(19) United States
(12) Patent Application Publication
(10) Pub. No.: US 2010/0196889 A1
(43) Pub. Date: Aug. 5, 2010

(54) Gene Expression Profiling for Identification, Monitoring and Treatment of Colorectal Cancer

(76) Inventors: Danute M. Bankaitis-Davis, Longmont, CO (US); Lisa Siconolfi, Westminster, CO (US); Kathleen Storm, Longmont, CO (US); Karl Wassmann, Dover, MA (US)

Correspondence Address: MINTZ, LEVIN, COHN, FERRIS, GLOVSKY AND POPEO, P.C, ONE FINANCIAL CENTER, BOSTON, MA, 02111, US

(21) Appl. No.: 12/514,775

(22) PCT Filed: Nov. 13, 2006
(86) PCT No.: PCT/US2007/023407

§ 371 Date: Mar. 29, 2010

Related U.S. Application Data
(60) Provisional application No. 60/858,965, filed on Nov. 13, 2006.

(51) Int. Cl. C12Q 1/68

(52) U.S. Cl. 435/6

(57) ABSTRACT

A method is provided in various embodiments for determining a profile data set for a subject with colorectal cancer or conditions related to colorectal cancer based on a sample from the subject, wherein the sample provides a source of RNAs. The method includes using amplification for measuring the amount of RNA corresponding to at least 1 constituent from Tables 1-5. The profile data set comprises the measure of each constituent, and amplification is performed under measurement conditions that are substantially repeatable.

### REFERENCE TO RELATED APPLICATIONS

[0001] This application claims the benefit of U.S. Provisional Application No. 60/858,965 filed Nov. 13, 2006 the contents of which are incorporated by reference in its entirety.

### FIELD OF THE INVENTION

[0002] The present invention relates generally to the identification of biological markers associated with the identification of colorectal cancer. More specifically, the present invention relates to the use of gene expression data in the identification, monitoring and treatment of colorectal cancer and in the characterization and evaluation of conditions induced by or related to colorectal cancer.

### BACKGROUND OF THE INVENTION

[0003] Colorectal cancer is a type of cancer that develops in the gastrointestinal system (GI system), specifically in the colon, or the rectum. The GI system consists of the small intestine, the large intestine (also known as the colon), the rectum, and the anus. The colon is a muscular tube, about five feet long on average, and has four sections: the ascending colon which begins where the small bowel attaches to the colon and extends upward on the rights side of the abdomen; the transverse colon, which runs across the body from the right to left side in the upper abdomen; the descending colon, which continues downward on the left side; and the sigmoid colon, which joins the rectum, which in turn joins the anus. The wall of each of the sections of the colon and rectum has several layers of tissue. Colorectal cancer starts in the innermost layer of tissue of the colon or rectum and can grow through some or all of the other layers. The stage (i.e., the extent of spread) of colorectal cancer depends on how deeply it invades into these layers.

[0004] Colorectal cancer develops slowly over a period of several years, usually beginning as a non-cancerous or pre-cancerous polyp which develops on the lining of the colon or rectum. Certain kinds of polyps, called adenomatous polyps (or adenomas), are highly likely to become cancerous. Other kinds of polyps, called hyperplastic polyps and inflammatory polyps, indicate an increased chance of developing adenomatous polyps and cancer, particularly if growing in the ascending colon. A pre-cancerous condition known as dysplasia is common in people suffering from diseases which cause chronic inflammation in the colon, such as ulcerative colitis or Chrohn's Disease.

[0005] Over 95% of colorectal cancers are adenocarcinomas, a cancer of the glandular cells that line the inside layer of the wall of the colon and rectum. Other types of colorectal tumors include carcinoid tumors, which develop from hormone producing cells of the colon; gastrointestinal stromal tumors, which develop in the interstitial cells of Cajal within the wall of the colon; and lymphomas of the digestive system.

[0006] Once cancer forms within a colorectal polyp, it eventually grows into the wall of the colon or rectum. Once cancer cells are in the wall, they can grow into blood vessels or lymph vessels, at which point the cancer metastizes.

[0007] Colorectal cancer is the third most common cancer diagnosed in men and women, and is the second leading cause of cancer-related deaths in the United States. Risk factors for colorectal cancer include age (increased chance after age 50); personal history of colorectal cancer, polyps, or chronic inflammatory bowel disease; ethnic background (Jews of Eastern European descent have higher rates of colorectal cancer); a diet mostly from animal sources (high in fat); physical inactivity; obesity; smoking (30-40% increased risk for colorectal cancer); and high alcohol intake. Additionally, individuals with a family history of colorectal cancer have an increased risk for developing the disease. About 30% of people who develop colorectal cancer have disease that is familial. About another 10% of people who develop colorectal cancer have an inherited genetic susceptibility to the disease; approximately 3-5% of colorectal cancers are associated with a syndrome called hereditary non-polyposis colorectal cancer (HNPCC), approximately 1% of colorectal cancers are associated with an inherited syndrome called familial adenomatous polyposis (FAP).

[0008] FAP is a disease where people develop hundreds of polyps in their colon and rectum, typically between the ages of 5 and 40 years. Cancer develops in one or more of these polyps as early as age 20. By age 40, almost all people with FAP will have developed cancer if preventative surgery is not done. HNPCC also develops at a relatively young age. However, individuals with HNPCC develop only a few polyps. Women with HNPCC have a high risk of developing endometrial cancer. Other cancers associated with HNPCC include cancer of the ovary, stomach, small intestine, pancreas, kidney, ureter, and bile duct. The lifetime risk of developing colorectal cancer for people with HNPCC is about 80%, compared to near 100% for those with FAP.

[0009] From the time the first abnormal cells in polyps start to grow, it takes about 10-15 years for them to develop into colorectal cancer. An individual can live asymptomatic for several years with precancerous polyps that develop into colorectal cancer without knowing it. Once symptoms do start presenting, they include changes in bowel habits (e.g., constipation, diarrhea, narrowing of the stool), stomach cramping or bloating, bright red blood in stool, unexplained weight loss, constant fatigue, constant sensation of needing a bowel movement, nausea and vomiting, gaseousness, and anemia.

[0010] Treatment of colorectal cancer varies according to type, location, extent, and aggressiveness of the cancer, and can include any one or combination of the following procedures: surgery, radiation therapy, and chemotherapy, and targeted therapy (e.g., monoclonal antibodies). Surgery is the main treatment for colorectal cancer. At early stages it may be possible to remove cancerous polyps through a colonoscope, by passing a wire loop through the colonoscope to cut the polyp from the wall of the colon with an electrical current. The most common operation for colon cancer is a segmental resection, in which the cancer a length of the normal colon on either side of the cancer, and nearby lymph nodes are removed, and the remaining sections of the colon are reattached.

[0011] Radiation therapy uses high energy rays to destroy cancer cells, and is used after colorectal surgery to destroy small deposits of cancer that may not be detected during surgery, or when the cancer has attached to an internal organ or lining of the abdomen. Radiation therapy is also used to treat local recurrences of rectal cancer. Several types of radiation therapy are available, including external-beam radiation therapy, endocavitry radiation therapy, and brachytherapy. Radiation therapy is also often used after surgery in combination with chemotherapy.

[0012] Chemotherapy can also be used to shrink primary tumors, relieve symptoms of advanced colorectal cancer, or as an adjuvant therapy. Fluorouracil (5-FU) is the drug most often used to treat colon cancer. In adjuvant therapy, it is often administered with leucovorin via an IV injection regimen to increase its effectiveness. Capecitabine (Xeloda™) is an orally administered chemotherapeutic that is converted to 5-FU once it reaches the tumor site. Other chemotherapeutics which have been found to increase the effectiveness 5-FU and leucovorin when given in combination include Irinotecan (Camptosar™), and Oxaliplatin.

[0013] Targeted therapies such as monoclonal antibodies are being used more frequently to specifically attack cancer cells with fewer side effects than radiation therapy or chemotherapy. Monoclonal antibodies that have been approved for the treatment of colon cancer include Cetuximab (Erbitux™), and Bevacizumab (Avastin™).

[0014] Since individuals with colon cancer can live for several years asymptomatic while the disease progresses, regular screenings are essential to detect colorectal cancer at an early stage, or to prevent abnormal polyps from developing into colorectal cancer. Diagnosis for colorectal cancer is typically done through a combination of a medical history, physical exam, blood tests for anemia or tumor markers (e.g., carcinoembryonic antigen, or CA19-9); and one or more screening methods for polyps or abnormalities in the lining of the colorectal wall.

[0015] A number of different screening methods for colorectal cancer are available. However, most procedures are highly invasive and painful. Take home test kits such as the fecal occult blood test (FOBT), or fecal immunochemical test (FIT), use a chemical reaction to detect occult (hidden blood) in the feces due to ruptured blood vessels at the surface of colorectal polyps of adenomas or cancers, damaged by the passage of feces. However, since occult in the stool could be indicative of a variety of gastrointestinal disorders, a colonoscopy or sigmoidoscopy is necessary to verify that positive FOBT or FIT results are due to colorectal cancer.

[0016] A colonoscopy involves a colonoscope which is a longer version of a sigmoidoscope, connected to a camera or monitor, and is inserted through the rectum to enable a doctor to visualize the lining of the entire colon. Polyps detected by such screening methods can be removed through a colonoscope or biopsied to determine whether the polyp is cancerous, benign, or a result of inflammation.

[0017] Additional screening techniques include invasive imaging techniques such as a barium enema with air contrast, or virtual colonoscopy. A barium enema with air contrast involves pumping barium sulfate and air through the anus to partially fill and open up the colon, then x-ray to image the lining of the colon. Virtual colonoscopy uses only air pumped through the anus to distend the colon, then a helical or spiral CT scan to image the lining of the colon. Ultrasound, CT scan, PET scan, and MRI can also be used to image the lining of the colorectal wall. However, if abnormalities such as polyps are found by any such imaging technique, a procedure such as a colonoscopy or CT guided needle biopsy is still necessary to remove or biopsy the polyp. It is nearly impossible to detect or verify a diagnosis of colorectal cancer in a non-invasive manner, and without causing the patient pain and discomfort. Thus a need exists for better ways to diagnose and monitor the progression and treatment of colorectal cancer.

[0018] Additionally, information on any condition of a particular patient and a patient's response to types and dosages of therapeutic or nutritional agents has become an important issue in clinical medicine today not only from the aspect of efficiency of medical practice for the health care industry but for improved outcomes and benefits for the patients. Thus, there is the need for tests which can aid in the diagnosis and monitor the progression and treatment of colorectal cancer.

### SUMMARY OF THE INVENTION

[0019] The invention is in based in part upon the identification of gene expression profiles (Precision Profiles™) associated with colon cancer. These genes are referred to herein as colon cancer associated genes or colon cancer associated constituents. More specifically, the invention is based upon the surprising discovery that detection of as few as one colon cancer associated gene in a subject derived sample is capable of identifying individuals with or without colon cancer with at least 75% accuracy. More particularly, the invention is based upon the surprising discovery that the methods provided by the invention are capable of detecting colon cancer by assaying blood samples.

[0020] In various aspects the invention provides methods of evaluating the presence or absence (e.g., diagnosing or prognosing) of colon cancer, based on a sample from the subject, the sample providing a source of RNAs, and determining a quantitative measure of the amount of at least one constituent of any constituent (e.g., colon cancer associated gene) of any of Tables 1, 2, 3, 4, and 5 and arriving at a measure of each constituent.

[0021] Also provided are methods of assessing or monitoring the response to therapy in a subject having colon cancer, based on a sample from the subject, the sample providing a source of RNAs, determining a quantitative measure of the amount of at least one constituent of any constituent of Tables 1, 2, 3, 4, 5 or 6 and arriving at a measure of each constituent. The therapy, for example, is immunotherapy. Preferably, one or more of the constituents listed in Table 6 is measured. For example, the response of a subject to immunotherapy is monitored by measuring the expression of TNFRSF10A, TMPRSS2, SPARC, ALOX5, PTPRC, PDGFA, PDGFB, BCL2, BAD, BAK1, BAG2, KIT, MUC1, ADAM17, CD19, CD4, CD40LG, CD86, CCR5, CTLA4, HSPA1A, IFNG, IL23A, PTGS2, TLR2, TGFB1, TNF, TNFRSF13B, TNFRSF10B, VEGF, MYC, AURKA, BAX, CDH1, CASP2, CD22, IGF1R, ITGA5, ITGAV, ITGB1, ITGB3, IL6R, JAK1, JAK2, JAK3, MAP3K1, PDGFRA, COX2, PSCA, THBS1, THBS2, TYMS, TLR1, TLR3, TLR6, TLR7, TLR9, TNFSF10, TNFSF13B, TNFRSF17, TP53, ABL1, ABL2, AKT1, KRAS, BRAF, RAF1, ERBB4, ERBB2, ERBB3, AKT2, EGFR, IL12 or IL15. The subject has received an immunotherapeutic drug such as anti CD19 Mab, rituximab, epratuzumab, lumiliximab, visilizumab (Nuvion), HuMax-CD38, zanolimumab, anti CD40 Mab, anti-CD40L, Mab, galiximab anti-CTLA-4 MAb, ipilimumab, ticilimumab, anti-SDF-1 MAb, panitumumab, nimotuzumab, pertuzumab, trastuzumab, catumaxomab, ertumaxomab, MDX-070, anti ICOS, anti IFNAR, AMG-479, anti-IGF-1R Ab, R1507, IMC-A12, antiangiogenesis MAb, CNTO-95, natalizumab (Tysabri), SM3, IPB-01, hPAM-4, PAM4, Imuteran, huBrE-3 tiuxetan, BrevaRex MAb, PDGFR MAb, IMC-3G3, GC-1008, CNTO-148 (Golimumab), CS-1008, belimumab, anti-BAFF MAb, or bevacizumab. Alternatively, the subject has received a placebo.

[0022] In a further aspect the invention provides methods of monitoring the progression of colon cancer in a subject, based on a sample from the subject, the sample providing a source of RNAs, by determining a quantitative measure of the amount of at least one constituent of any constituent of Tables 1, 2, 3, 4, and 5 as a distinct RNA constituent in a sample obtained at a first period of time to produce a first subject data set and determining a quantitative measure of the amount of at least one constituent of any constituent of Tables 1, 2, 3, 4, and 5 as a distinct RNA constituent in a sample obtained at a second period of time to produce a second subject data set. Optionally, the constituents measured in the first sample are the same constituents measured in the second sample. The first subject data set and the second subject data set are compared allowing the progression of colon cancer in a subject to be determined. The second subject is taken e.g., one day, one week, one month, two months, three months, 1 year, 2 years, or more after the first subject sample. Optionally the first subject sample is taken prior to the subject receiving treatment, e.g. chemotherapy, radiation therapy, or surgery and the second subject sample is taken after treatment.

[0023] In various aspects the invention provides a method for determining a profile data set, i.e., a colon cancer profile, for characterizing a subject with colon cancer or conditions related to colon cancer based on a sample from the subject, the sample providing a source of RNAs, by using amplification for measuring the amount of RNA in a panel of constituents including at least 1 constituent from any of Tables 1-5, and arriving at a measure of each constituent. The profile data set contains the measure of each constituent of the panel.

[0024] The methods of the invention further include comparing the quantitative measure of the constituent in the subject derived sample to a reference value or a baseline value, e.g. baseline data set. The reference value is for example an index value. Comparison of the subject measurements to a reference value allows for the present or absence of colon cancer to be determined, response to therapy to be monitored or the progression of colon cancer to be determined. For example, a similarity in the subject data set compares to a baseline data set derived form a subject having colon cancer indicates that presence of colon cancer or response to therapy that is not efficacious. Whereas a similarity in the subject data set compares to a baseline data set derived from a subject not having colon cancer indicates the absence of colon cancer or response to therapy that is efficacious. In various embodiments, the baseline data set is derived from one or more other samples from the same subject, taken when the subject is in a biological condition different from that in which the subject was at the time the first sample was taken, with respect to at least one of age, nutritional history, medical condition, clinical indicator, medication, physical activity, body mass, and environmental exposure, and the baseline profile data set may be derived from one or more other samples from one or more different subjects.

[0025] The baseline data set or reference values may be derived from one or more other samples from the same subject taken under circumstances different from those of the first sample, and the circumstances may be selected from the group consisting of (i) the time at which the first sample is taken (e.g., before, after, or during treatment cancer treatment), (ii) the site from which the first sample is taken, (iii) the biological condition of the subject when the first sample is taken.

[0026] The measure of the constituent is increased or decreased in the subject compared to the expression of the constituent in the reference, e.g., normal reference sample or baseline value. The measure is increased or decreased 10%, 25%, 50% compared to the reference level. Alternately, the measure is increased or decreased 1, 2, 5 or more fold compared to the reference level.

[0027] In various aspects of the invention the methods are carried out wherein the measurement conditions are substantially repeatable, particularly within a degree of repeatability of better than ten percent, five percent or more particularly within a degree of repeatability of better than three percent, and/or wherein efficiencies of amplification for all constituents are substantially similar, more particularly wherein the efficiency of amplification is within ten percent, more particularly wherein the efficiency of amplification for all constituents is within five percent, and still more particularly wherein the efficiency of amplification for all constituents is within three percent or less.

[0028] In addition, the one or more different subjects may have in common with the subject at least one of age group, gender, ethnicity, geographic location, nutritional history, medical condition, clinical indicator, medication, physical activity, body mass, and environmental exposure. A clinical indicator may be used to assess colon cancer or a condition related to colon cancer of the one or more different subjects, and may also include interpreting the calibrated profile data set in the context of at least one other clinical indicator, wherein the at least one other clinical indicator includes blood chemistry, X-ray or other radiological or metabolic imaging technique, molecular markers in the blood, other chemical assays, and physical findings.

[0029] At least 1, 2, 3, 4, 5, 6, 7, 8, 9, 10, 15, 20, 30, 40, 50 or more constituents are measured. Preferably; XIN2, C1QA, CDKN2A, CCR7, CNKSR2, C1QB, EGR1, MSH2, MSH6 or RHOC is measured.

[0030] In one aspect, two constituents from Table 1 are measured. The first constituent is ACSL5, ALDH1A1, APC, AXIN2, BAX, CA4, CCND3, CD44, CD63, CFLAR, GADD45A, IGFBP4, ITGA3, MGMT, MSH2, or MSH6 and the second constituent is any other constituent from Table 1.

[0031] In another aspect two constituents from Table 2 are measured. The first constituent is ADAM17, ALOX5, APAF1, C1QA, CASP1, CASP3, CCL3, CCL5, CCR5, CD19, CD4, CD8A, CTLA4, CXCL1, CXCR3, DPP4, EGR1, GZMB, HLADRA, HMOX1, HSPA1A, ICAM1, IFI16, IFNG, IL10, IL18, IL18BP, IL1B, IL1R1, IL1RN, IL23A, IL32, IL8, WE1, LTA, MAPK14, MHC2TA, MIF, MMP9, MNDA, MYC, NFB1, PLA2G7, PLAUR, PTGS2, PTPRC, SERPINA1, SSI3, TGFB1, TIMP1, TLR2, TNF, or TNFRSF1A, and the second constituent is any other constituent from Table 2.

[0032] In a further aspect two constituents from Table 3 are measured. The first constituent is ABL1, ABL2, AKT1, APAF1, ATM, BAD, BAX, BCL2, BRAF, BRCA1, CASP8, CDK2, CDK4, CDK5, CDKN1A, CDKN2A, CFLAR, COL18A1, E2F1, EGR1, ERBB2, FOS, GZMA, HRAS, IFITM1, IL1B, IL8, ITGA1, ITGA3, ITGAE, ITGB1, MMP9, MSH2, MYC, MYCL1, NFKB1, NME4, NOTCH2, NRAS, PCNA, PLAUR, PTCH1, RB1, RHOA, RHOC, S100A4, SEMA4D, SERPINE1, SKI, SKIL, SMAD4, TGFB1, or TNF and the second constituent is any other constituent from Table 3.

[0033] In yet another aspect two constituents from Table 4 are measured. The first constituent is, CEBPB, CREBBP, EGR1, EGR2, FOS, ICAM1, MAP2K1, NAB1, NKB1, NR4A2, SRC, TGFB1, and TOPBP1 and the second constituent is from the group consisting of NAB1, NR4A2, PDGFA, PTEN, TGFB1, TNFRSF6, or TOPBP1, and the second constituent is any other constituent from Table 4.

[0034] In a further aspect two constituents from Table 5 are measured. The first constituent is ADAM17, APC, AXIN2, BAX, BCAM, C1QA, C1QB, CA4, CASP9, CAV1, CCL3, CCL5, CCR7, CD59, CD97, CNKSR2, CTNNA1, CTSD, DAD1, DIABLO, E2F1, EGR1, ESR1, ETS2, FOS, G6PD, GNB1, GSK3B, HMGA1, HMOX1, HOXA10, IFI16, IGF2BP2, IKBKE, IL8, ING2, IQGAP1, IRF1, ITGAL, LARGE, LGALS8, LTA, MAPK14, MLH1, MME, MMP9, MNDA, MSH2, MSH6, MTA1, MTF1, MYD88, NBEA, NCOA1, NRAS, PLEK2, PLXDC2, PTEN, PTPRK, RBM5, S100A4, SERPINE1, SERPING1, SIAH2, SPARC, SRF, ST14, TGFB1, TIMP1, TLR2, TNF, TNFRSF1A, TNFSF5, or UBE2C and the second constituent is any other constituent from Table 5.

[0035] The panel of constituents are selected so as to distinguish from a normal and a colorectal cancer-diagnosed subject. The colorectal cancer-diagnosed subject is diagnosed with different stages of cancer. Alternatively, the panel of constituents is selected as to permit characterizing the severity of colon cancer in relation to a normal subject over time so as to track movement toward normal as a result of successful therapy and away from normal in response to cancer recurrence. Thus in some embodiments, the methods of the invention are used to determine efficacy of treatment of a particular subject.

[0036] Preferably, the constituents are selected so as to distinguish, e.g., classify between a normal and a colon cancer-diagnosed subject with at least 75%, 80%, 85%, 90%, 95%, 97%, 98%, 99% or greater accuracy. By “accuracy” is meant that the method has the ability to distinguish, e.g., classify, between subjects having colon cancer or conditions associated with colon cancer, and those that do not. Accuracy is determined for example by comparing the results of the Gene Precision Profiling™ to standard accepted clinical methods of diagnosing colorectal cancer, e.g., one or more symptoms of colorectal cancer such changes in bowel habits (e.g., constipation, diarrhea, narrowing of the stool), stomach cramping or bloating, bright red blood in stool, unexplained weight loss, constant fatigue, constant sensation of needing a bowel movement, nausea and vomiting, gaseousness, and anemia.

[0037] For example the combination of constituents are selected according to any of the models enumerated in Tables 1A, 2A, 3A, 4A, or 5A.

[0038] In some embodiments, the methods of the present invention are used in conjunction with standard accepted clinical methods to diagnose colon cancer. By colorectal cancer or conditions related to colorectal cancer is meant the growth of abnormal cells in the colon or the rectum, capable of invading and destroying other colorectal cells, and includes adenocarcinomas, carcinoid tumors, gastrointestinal stromal tumors, and lymphomas of the digestive system. The term colorectal cancer encompasses both colon cancer and rectal cancer.

[0039] The sample is any sample derived from a subject which contains RNA. For example, the sample is blood, a blood fraction, body fluid, a population of cells or tissue from the subject, a colon cell, or a rare circulating tumor cell or circulating endothelial cell found in the blood.

[0040] Optionally one or more other samples can be taken over an interval of time that is at least one month between the first sample and the one or more other samples, or taken over an interval of time that is at least twelve months between the first sample and the one or more samples, or they may be taken pre-therapy intervention or post-therapy intervention. In such embodiments, the first sample may be derived from blood and the baseline profile data set may be derived from tissue or body fluid of the subject other than blood. Alternatively, the first sample is derived from tissue or bodily fluid of the subject and the baseline profile data set is derived from blood.

[0041] Also included in the invention are kits for the detection of colon cancer in a subject, containing at least one reagent for the detection or quantification of any constituent measured according to the methods of the invention and instructions for using the kit.

[0042] Unless otherwise defined, all technical and scientific terms used herein have the same meaning as commonly understood by one of ordinary skill in the art to which this invention belongs. Although methods and materials similar or equivalent to those described herein can be used in the practice or testing of the present invention, suitable methods and materials are described below. All publications, patent applications, patents, and other references mentioned herein are incorporated by reference in their entirety. In case of conflict, the present specification, including definitions, will control. In addition, the materials, methods, and examples are illustrative only and not intended to be limiting.

[0043] Other features and advantages of the invention will be apparent from the following detailed description and claims.

### BRIEF DESCRIPTION OF THE DRAWINGS

[0044] FIG. 1 is a graphical representation of a 2-gene model for cancer based on disease-specific genes, capable of distinguishing between subjects afflicted with cancer and normal subjects with a discrimination line overlaid onto the graph as an example of the Index Function evaluated at a particular logit value. Values above and to the left of the line represent subjects predicted to be in the normal population. Values below and to the right of the line represent subjects predicted to be in the cancer population. ALOX5 values are plotted along the Y-axis, S100A6 values are plotted along the X-axis.

[0045] FIG. 2 is a graphical representation of a 2-gene model, MSH6 and PSEN2, based on the Precision Profile™ for Colorectal Cancer (Table 1), capable of distinguishing between subjects afflicted with colon cancer and normal subjects, with a discrimination line overlaid onto the graph as an example of the Index Function evaluated at a particular logit value. Values below and to the right of the line represent subjects predicted to be in the normal population. Values above and to the left of the line represent subjects predicted to be in the colon cancer population. MSH6 values are plotted along the Y-axis, PSEN2 values are plotted along the X-axis.

[0046] FIG. 3 is a graphical representation of the Z-statistic values for each gene shown in Table 1B. A negative Z statistic means up-regulation of gene expression in colon cancer vs. normal patients; a positive Z statistic means down-regulation of gene expression in colon cancer vs. normal patients.

[0047] FIG. 4 is a graphical representation of a colon cancer index based on the 2-gene logistic regression model, MSH6 and PSEN2, capable of distinguishing between normal, healthy subjects and subjects suffering from colon cancer.

[0048] FIG. 5 is a graphical representation of a 2-gene model, HMOX1 and TXNRD1, based on the Precision Profile™ for Inflammatory Response (Table 2), capable of distinguishing between subjects afflicted with colon cancer and normal subjects, with a discrimination line overlaid onto the graph as an example of the Index Function evaluated at a particular logit value. Values above and to the left of the line represent subjects predicted to be in the normal population. Values below and to the right of the line represent subjects predicted to be in the colon cancer population. HMOX1 values are plotted along the Y-axis, TXNRD1 values are plotted along the X-axis.

[0049] FIG. 6 is a graphical representation of a 2-gene model, ATM and CDKN2A, based on the Human Cancer General Precision Profile™ (Table 3), capable of distinguishing between subjects afflicted with colon cancer and normal subjects, with a discrimination line overlaid onto the graph as an example of the Index Function evaluated at a particular logit value. Values below and to the right of the line represent subjects predicted to be in the normal population. Values above and to the left of the line represent subjects predicted to be in the colon cancer population. ATM values are plotted along the Y-axis, CDKN2A values are plotted along the X-axis.

[0050] FIG. 7 is a graphical representation of a 2-gene model, AXIN2 and TNF, based on the Cross-Cancer Precision Profile™ (Table 5), capable of distinguishing between subjects afflicted with colon cancer and normal subjects, with a discrimination line overlaid onto the graph as an example of the Index Function evaluated at a particular logit value. Values below and to the right of the line represent subjects predicted to be in the normal population. Values above and to the left of the line represent subjects predicted to be in the colon cancer population. AXIN2 values are plotted along the Y-axis, TNF values are plotted along the X-axis.

### DETAILED DESCRIPTION

### Definitions

[0051] The following terms shall have the meanings indicated unless the context otherwise requires:

[0052] “Accuracy” refers to the degree of conformity of a measured or calculated quantity (a test reported value) to its actual (or true) value. Clinical accuracy relates to the proportion of true outcomes (true positives (TP) or true negatives (TN)) versus misclassified outcomes (false positives (FP) or false negatives (FN)), and may be stated as a sensitivity, specificity, positive predictive values (PPV) or negative predictive values (NPV), or as a likelihood, odds ratio, among other measures.

[0053] “Algorithm” is a set of rules for describing a biological condition. The rule set may be defined exclusively algebraically but may also include alternative or multiple decision points requiring domain-specific knowledge, expert interpretation or other clinical indicators.

[0054] An “agent” is a “composition” or a “stimulus”, as those terms are defined herein, or a combination of a composition and a stimulus.

[0055] “Amplification” in the context of a quantitative RT-PCR assay is a function of the number of DNA replications that are required to provide a quantitative determination of its concentration.

[0056] “Amplification” here refers to a degree of sensitivity and specificity of a quantitative assay technique. Accordingly, amplification provides a measurement of concentrations of constituents that is evaluated under conditions wherein the efficiency of amplification and therefore the degree of sensitivity and reproducibility for measuring all constituents is substantially similar.

[0057] A “baseline profile data set” is a set of values associated with constituents of a Gene Expression Panel (Precision Profile™) resulting from evaluation of a biological sample (or population-onset of samples) under a desired biological condition that is used for mathematically normative purposes. The desired biological condition may be, for example, the condition of a subject (or population or set of subjects) before exposure to an agent or in the presence of an untreated disease or in the absence of a disease. Alternatively, or in addition, the desired biological condition may be health of a subject or a population or set of subjects. Alternatively, or in addition, the desired biological condition may be that associated with a population or set of subjects selected on the basis of at least one of age group, gender, ethnicity, geographic location, nutritional history, medical condition, clinical indicator, medication, physical activity, body mass, and environmental exposure.

[0058] A “biological condition” of a subject is the condition of the subject in a pertinent realm that is under observation, and such realm may include any aspect of the subject capable of being monitored for change in condition, such as health; disease including cancer; trauma; aging; infection; tissue degeneration; developmental steps; physical fitness; obesity, and mood. As can be seen, a condition in this context may be chronic or acute or simply transient. Moreover, a targeted biological condition may be manifest throughout the organism or population of cells or may be restricted to a specific organ (such as skin, heart, eye or blood), but in either case, the condition may be monitored directly by a sample of the affected population of cells or indirectly by a sample derived elsewhere from the subject. The term “biological condition” includes a “physiological condition”.

[0059] “Body fluid” of a subject includes blood, urine, spinal fluid, lymph, mucosal secretions, prostatic fluid, semen, haemolymph or any other body fluid known in the art for a subject.

[0060] “Calibrated profile data set” is a function of a member of a first profile data set and a corresponding member of a baseline profile data set for a given constituent in a panel.

[0061] A “circulating endothelial cell” (“CEC”) is an endothelial cell from the inner wall of blood vessels which sheds into the bloodstream under certain circumstances, including inflammation, and contributes to the formation of new vasculature associated with cancer pathogenesis. CECs may be useful as a marker of tumor progression and/or response to antiangiogenic therapy.

[0062] A “circulating tumor cell” (“CTC”) is a tumor cell of epithelial origin which is shed from the primary tumor upon metastasis, and enters the circulation. The number of circulating tumor cells in peripheral blood is associated with prognosis in patients with metastatic cancer. These cells can be separated and quantified using immunologic methods that detect epithelial cells.

[0063] A “clinical indicator” is any physiological datum used alone or in conjunction with other data in evaluating the physiological condition of a collection of cells or of an organism. This term includes pre-clinical indicators.

[0064] “Clinical parameters” encompasses all non-sample or non-Precision Profiles™ of a subject's health status or other characteristics, such as, without limitation, age (AGE), ethnicity (RACE), gender (SEX), and family history of cancer.

[0065] “Colorectal cancer” is a type of cancer that develops in the colon, or the rectum and includes adenocarcinomas, carcinoid tumors, gastrointestinal stromal tumors, and lymphomas of the digestive system. The term colorectal cancer encompasses both colon cancer and rectal cancer. The terms colorectal cancer and colon cancer are used interchangeably herein.

[0066] A “composition” includes a chemical compound, a nutraceutical, a pharmaceutical, a homeopathic formulation, an allopathic formulation, a naturopathic formulation, a combination of compounds, a toxin, a food, a food supplement, a mineral, and a complex mixture of substances, in any physical state or in a combination of physical states.

[0067] To “derive” a profile data set from a sample includes determining a set of values associated with constituents of a Gene Expression Panel (Precision Profile™) either (i) by direct measurement of such constituents in a biological sample.

[0068] “Distinct RNA or protein constituent” in a panel of constituents is a distinct expressed product of a gene, whether RNA or protein. An “expression” product of a gene includes the gene product whether RNA or protein resulting from translation of the messenger RNA.

[0069] “FN” is false negative, which for a disease state test means classifying a disease subject incorrectly as non-disease or normal.

[0070] “FP” is false positive, which for a disease state test means classifying a normal subject incorrectly as having disease.

[0071] A “formula,” “algorithm,” or “model” is any mathematical equation, algorithmic, analytical or programmed process, statistical technique, or comparison, that takes one or more continuous or categorical inputs (herein called “parameters”) and calculates an output value, sometimes referred to as an “index” or “index value.” Non-limiting examples of “formulas” include comparisons to reference values or profiles, sums, ratios, and regression operators, such as coefficients or exponents, value transformations and normalizations (including, without limitation, those normalization schemes based on clinical parameters, such as gender, age, or ethnicity), rules and guidelines, statistical classification models, and neural networks trained on historical populations. Of particular use in combining constituents of a Gene Expression Panel (Precision Profile™) are linear and non-linear equations and statistical significance and classification analyses to determine the relationship between levels of constituents of a Gene Expression Panel (Precision Profile™) detected in a subject sample and the subject's risk of colorectal cancer. Impanel and combination construction, of particular interest are structural and synactic statistical classification algorithms, and methods of risk index construction, utilizing pattern recognition features, including, without limitation, such established techniques such as cross-correlation, Principal Components Analysis (PCA), factor rotation, Logistic Regression Analysis (LogReg), Kolmogorov Smirnoff tests (KS), Linear Discriminant Analysis (LDA), Eigengene Linear Discriminant Analysis (ELDA), Support Vector Machines (SVM), Random Forest (RF), Recursive Partitioning Tree (RPART), as well as other related decision tree classification techniques (CART, LART, LARTree, FlexTree, amongst others), Shrunken Centroids (SC), StepAIC, K-means, Kth-Nearest Neighbor, Boosting, Decision Trees, Neural Networks, Bayesian Networks, Support Vector Machines, and Hidden Markov Models, among others. Other techniques may be used in survival and time to event hazard analysis, including Cox, Weibull, Kaplan-Meier and Greenwood models well known to those of skill in the art. Many of these techniques are useful either combined with a consituentes of a Gene Expression Panel (Precision Profile™) selection technique, such as forward selection, backwards selection, or stepwise selection, complete enumeration of all potential panels of a given size, genetic algorithms, voting and committee methods, or they may themselves include biomarker selection methodologies in their own technique. These may be coupled with information criteria, such as Akaike's Information Criterion (AIC) or Bayes Information Criterion (BIC), in order to quantify the tradeoff between additional biomarkers and model improvement, and to aid in minimizing overfit. The resulting predictive models may be validated in other clinical studies, or cross-validated within the study they were originally trained in, using such techniques as Bootstrap, Leave-One-Out (LOO) and 10-Fold cross-validation (10-Fold CV). At various steps, false discovery rates (FDR) may be estimated by value permutation according to techniques known in the art.

[0072] A “Gene Expression Panel” (Precision Profile™) is an experimentally verified set of constituents, each constituent being a distinct expressed product of a gene, whether RNA or protein, wherein constituents of the set are selected so that their measurement provides a measurement of a targeted biological condition.

[0073] A “Gene Expression Profile™” is a set of values associated with constituents of a Gene Expression Panel (Precision Profile™) resulting from evaluation of a biological sample (or population or set of samples).

[0074] A “Gene Expression Profile InflammationIndex” is the value of an index function that provides a mapping from an instance of a Gene Expression Profile into a single-valued measure of inflammatory condition.

[0075] A Gene Expression Profile Cancer Index” is the value of an index function that provides a mapping from an instance of a Gene Expression Profile into a single-valued measure of a cancerous condition.

[0076] The “health” of a subject includes mental, emotional, physical, spiritual, allopathic, naturopathic and homeopathic condition of the subject.

[0077] “Index” is an arithmetically or mathematically derived numerical characteristic developed for aid in simplifying or disclosing or informing the analysis of more complex quantitative information. A disease or population index may be determined by the application of a specific algorithm to a plurality of subjects or samples with a common biological condition.

[0078] “Inflammation” is used herein in the general medical sense of the word and may be an acute or chronic; simple or suppurative; localized or disseminated; cellular and tissue response initiated or sustained by any number of chemical, physical or biological agents or combination of agents.

[0079] “Inflammatory state” is used to indicate the relative biological condition of a subject resulting from inflammation, or characterizing the degree of inflammation.

[0080] A “large number” of data sets based on a common panel of genes is a number of data sets sufficiently large to permit a statistically significant conclusion to be drawn with respect to an instance of a data set based on the same panel.

[0081] “Negative predictive value” or “NPV” is calculated by TN/(TN+FN) or the true negative fraction of all negative test results. It also is inherently impacted by the prevalence of the disease and pre-test probability of the population intended to be tested.

See, e.g., O'Marcaigh A S, Jacobson R M, “Estimating the Predictive Value of a Diagnostic Test, How to Prevent Misleading or Confusing Results,” Clin. Ped. 1993, 32(8): 485-491, which discusses specificity, sensitivity, and positive and negative predictive values of a test, e.g., a clinical diagnostic test. Often, for binary disease state classification approaches using a continuous diagnostic test measurement, the sensitivity and specificity is summarized by Receiver Operating Characteristics (ROC) curves according to Pepe et al., “Limitations of the Odds Ratio in Gauging the Performance of a Diagnostic, Prognostic, or Screening Marker,” Am. J. Epidemiol 2004, 159 (9): 882-890, and summarized by the Area Under the Curve (AUC) or c-statistic, an indicator that allows representation of the sensitivity and specificity of a test, assay, or method over the entire range of test (or assay) cut points with just a single value. See also, e.g., Shultz, “Clinical Interpretation of Laboratory Procedures,” chapter 14 in Teitz, Fundamentals of Clinical Chemistry, Burtis and Ashwood (eds.), 4^{th} edition 1996, W.B. Saunders Company, pages 192-199; and Zweig et al., “ROC Curve Analysis: An Example Showing the Relationships Among Serum Lipid and Apolipoprotein Concentrations in Identifying Subjects with Coronory Artery Disease,” Clin. Chem., 1992, 38(8): 1425-1428. An alternative approach using likelihood functions, BIC, odds ratios, information theory, predictive values, calibration (including goodness-of-fit), and reclassification measurements is summarized according to Cook, “Use and Misuse of the Receiver Operating Characteristic Curve in Risk Prediction,” Circulation 2007, 115: 928-935.

[0082] A “normal” subject is a subject who is generally in good health, has not been diagnosed with colorectal cancer, is asymptomatic for colorectal cancer, and lacks the traditional laboratory risk factors for colorectal cancer.

[0083] A “normative” condition of a subject to whom a composition is to be administered means the condition of a subject before administration, even if the subject happens to be suffering from a disease.

[0084] A “panel” of genes is a set of genes including at least two constituents.

[0085] A “population of cells” refers to any group of cells wherein there is an underlying commonality or relationship between the members in the population of cells, including a group of cells taken from an organism or from a culture of cells or from a biopsy, for example.

[0086] “Positive predictive value” or “PPV” is calculated by TP/(TP+FP) or the true positive fraction of all positive test results. It is inherently impacted by the prevalence of the disease and pre-test probability of the population intended to be tested.

[0087] “Risk” in the context of the present invention, relates to the probability that an event will occur over a specific time period, and can mean a subject's “absolute” risk or “relative” risk. Absolute risk can be measured with reference to either actual observation post-measurement for the relevant time cohort, or with reference to index values developed from statistically valid historical cohorts that have been followed for the relevant timeperiod. Relative risk refers to the ratio of absolute risks of a subject compared either to the absolute risks of lower risk cohorts, across population divisions (such as tertiles, quartiles, quintiles, or deciles, etc.) or an average population risk, which can vary by how clinical risk factors are assessed. Odds ratios, the proportion of positive events to negative events for a given test result, are also commonly used (odds are according to the formula p/(1−p) where p is the probability of event and (1−p) is the probability of no event) to no-conversion.

[0088] “Risk evaluation,” or “evaluation of risk” in the context of the present invention encompasses making a prediction of the probability, odds, or likelihood that an event or disease state may occur, and/or the rate of occurrence of the event or conversion from one disease state to another, i.e., from a normal condition to cancer or from cancer remission to cancer, or from primary cancer occurrence to occurrence of a cancer metastasis. Risk evaluation can also comprise prediction of future clinical parameters, traditional laboratory risk factor values, or other indices of cancer results, either in absolute or relative terms in reference to a previously measured population. Such differing use may require different consituentes of a Gene Expression Panel (Precision Profile™) combinations and individualized panels, mathematical algorithms, and/or cut-off points, but be subject to the same aforementioned measurements of accuracy and performance for the respective intended use.

[0089] A “sample” from a subject may include a single cell or multiple cells or fragments of cells or an aliquot of body fluid, taken from the subject, by means including venipuncture, excretion, ejaculation, massage, biopsy, needle aspirate, lavage sample, scraping, surgical incision or intervention or other means known in the art. The sample is blood, urine, spinal fluid, lymph, mucosal secretions, prostatic fluid, semen, haemolymph or any other body fluid known in the art for a subject. The sample is also a tissue sample. The sample is or contains a circulating endothelial cell or a circulating tumor cell.

[0090] “Sensitivity” is calculated by TP/(TP+FN) or the true positive fraction of disease subjects.

[0091] “Specificity” is calculated by TN/(TN+FP) or the true negative fraction of non-disease or normal subjects.

[0092] By “statistically significant”, it is meant that the alteration is greater than what might be expected to happen by chance alone (which could be a “false positive”). Statistical significance can be determined by any method known in the art. Commonly used measures of significance include the p-value, which presents the probability of obtaining a result at least as extreme as a given data point, assuming the data point was the result of chance alone. A result is often considered highly significant at a p-value of 0.05 or less and statistically significant at a p-value of 0.10 or less. Such p-values depend significantly on the power of the study performed.

[0093] A “set” or “population” of samples or subjects refers to a defined or selected group of samples or subjects wherein there is an underlying commonality or relationship between the members included in the set or population of samples or subjects.

[0094] A “Signature Profile™” is an experimentally verified subset of a Gene Expression Profile selected to discriminate a biological condition, agent or physiological mechanism of action.

[0095] A “Signature Panel” is a subset of a Gene Expression Panel (Precision Profile™), the constituents of which are selected to permit discrimination of a biological condition, agent or physiological mechanism of action.

[0096] A “subject” is a cell, tissue, or organism, human or non-human, whether in vivo, ex vivo or in vitro, under observation. As used herein, reference to evaluating the biological condition of a subject based on a sample from the subject, includes using blood or other tissue sample from a human subject to evaluate the human subject's condition; it also includes, for example, using a blood sample itself as the subject to evaluate, for example, the effect of therapy or an agent upon the sample.

[0097] A “stimulus” includes (i) a monitored physical interaction with a subject, for example ultraviolet A or B, or light therapy for seasonal affective disorder, or treatment of psoriasis with psoralen or treatment of cancer with embedded radioactive seeds, other radiation exposure, and (ii) any monitored physical, mental, emotional, or spiritual activity or inactivity of a subject.

[0098] “Therapy” includes all interventions whether biological, chemical, physical, metaphysical, or combination of the foregoing, intended to sustain or alter the monitored biological condition of a subject.

[0099] “TN” is true negative, which for a disease state test means classifying a non-disease or normal subject correctly.

[0100] “TP” is true positive, which for a disease state test means correctly classifying a disease subject.

[0101] The PCT patent application publication number WO 01/25473, published Apr. 12, 2001, entitled “Systems and Methods for Characterizing a Biological Condition or Agent Using Calibrated Gene Expression Profiles,” filed for an invention by inventors herein, and which is herein incorporated by reference, discloses the use of Gene Expression Panels (Precision Profiles™) for the evaluation of (i) biological condition (including with respect to health and disease) and (ii) the effect of one or more agents on biological condition (including with respect to health, toxicity, therapeutic treatment and drug interaction).

[0102] In particular, the Gene Expression Panels (Precision Profiles™) described herein may be used, without limitation, for measurement of the following: therapeutic efficacy of natural or synthetic compositions or stimuli that may be formulated individually or in combinations or mixtures for a range of targeted biological conditions; prediction of toxicological effects and dose effectiveness of a composition or mixture of compositions for an individual or for a population or set of individuals or for a population of cells; determination of how two or more different agents administered in a single treatment might interact so as to detect any of synergistic, additive, negative, neutral or toxic activity; performing pre-clinical and clinical trials by providing new criteria for pre-selecting subjects according to informative profile data sets for revealing disease status; and conducting preliminary dosage studies for these patients prior to conducting phase 1 or 2 trials. These Gene Expression Panels (Precision Profiles™) may be employed with respect to samples derived from subjects in order to evaluate their biological condition.

[0103] The present invention provides Gene Expression Panels (Precision Profiles™) for the evaluation or characterization of colorectal cancer and conditions related to colorectal cancer in a subject. In addition, the Gene Expression Panels described herein also provide for the evaluation of the effect of one or more agents for the treatment of colorectal cancer and conditions related to colorectal cancer.

[0104] The Gene Expression Panels (Precision Profiles™) are referred to herein as the Precision Profile™ for Colorectal Cancer, the Precision Profile™ for Inflammatory Response, the Human Cancer General Precision Profile™, the Precision Profile™ for EGR1, and the Cross-Cancer Precision Profile™. The Precision Profile™ for Colorectal Cancer includes one or more genes, e.g., constituents, listed in Table 1, whose expression is associated with colorectal cancer or conditions related to colorectal cancer. The Precision Profile™ for Inflammatory Response includes one or more genes, e.g. constituents, listed in Table 2, whose expression is associated with inflammatory response and cancer. The Human Cancer General Precision Profile™ includes one or more genes, e.g., constituents, listed in Table 3, whose expression is associated generally with human cancer (including without limitation prostate, breast, ovarian, cervical, lung, colon, and skin cancer).

[0105] The Precision Profile™ for EGR1 includes one or more genes, e.g., constituents listed in Table 4, whose expression is associated with the role early growth response (EGR) gene family plays in human cancer. The Precision Profile™ for EGR1 is composed of members of the early growth response (EGR) family of zinc finger transcriptional regulators; EGR1, 2, 3 & 4 and their binding proteins; NAB1 & NAB2 which function to repress transcription induced by some members of the EGR family of transactivators. In addition to the early growth response genes, The Precision Profile™ for EGR1 includes genes involved in the regulation of immediate early gene expression, genes that are themselves regulated by members of the immediate early gene family (and EGR1 in particular) and genes whose products interact with EGR1, serving as co-activators of transcriptional regulation.

[0106] The Cross-Cancer Precision Profile™ includes one or more genes, e.g., constituents listed in Table 5, whose expression has been shown, by latent class modeling, to play a significant role across various types of cancer, including without limitation, prostate, breast, ovarian, cervical, lung, colon, and skin cancer. Each gene of the Precision Profile™ for Colorectal Cancer, the Precision Profile™ for Inflammatory Response, the Human Cancer General Precision Profile™, the Precision Profile™ for EGR1, and the Cross-Cancer Precision Profile™ is referred to herein as a colorectal cancer associated gene or a colorectal cancer associated constituent. In addition to the genes listed in the Precision Profiles™ herein, colorectal cancer associated genes or colorectal cancer associated constituents include oncogenes, tumor suppression genes, tumor progression genes, angiogenesis genes, and lymphogenesis genes.

[0107] The present invention also provides a method for monitoring and determining the efficacy of immunotherapy, using the Gene Expression Panels (Precision Profiles™) described herein. Immunotherapy target genes include, without limitation, TNFRSF10A, TMPRSS2, SPARC, ALOX5, PTPRC, PDGFA, PDGFB, BCL2, BAD, BAK1, BAG2, KIT, MUC1, ADAM17, CD19, CD4, CD40LG, CD86, CCR5, CTLA4, HSPA1A, IFNG, IL23A, PTGS2, TLR2, TGFB1, TNF, TNFRSF13B, TNFRSF10B, VEGF, MYC, AURKA, BAX, CDH1, CASP2, CD22, IGF1R, ITGA5, ITGAV, ITGB1, ITGB3, IL6R, JAK1, JAK2, JAK3, MAP3K1, PDGFRA, COX2, PSCA, THBS1, THBS2, TYMS, TLR1, TLR3, TLR6, TLR7, TLR9, TNFSF10, TNFSF13B, TNFRSF17, TP53, ABL1, ABL2, AKT1, KRAS, BRAF, RAF1, ERBB4, ERBB2, ERBB3, AKT2, EGFR, IL12, and IL15. For example, the present invention provides a method for monitoring and determining the efficacy of immunotherapy by monitoring the immunotherapy associated genes, i.e., constituents, listed in Table 6.

[0108] It has been discovered that valuable and unexpected results may be achieved when the quantitative measurement of constituents is performed under repeatable conditions (within a degree of repeatability of measurement of better than twenty percent, preferably ten percent or better, more preferably five percent or better, and more preferably three percent or better). For the purposes of this description and the following claims, a degree of repeatability of measurement of better than twenty percent may be used as providing measurement conditions that are “substantially repeatable”. In particular, it is desirable that each time a measurement is obtained corresponding to the level of expression of a constituent in a particular sample, substantially the same measurement should result for substantially the same level of expression. In this manner, expression levels for a constituent in a Gene Expression Panel (Precision Profile™) may be meaningfully compared from sample to sample. Even if the expression level measurements for a particular constituent are inaccurate (for example, say, 30% too low), the criterion of repeatability means that all measurements for this constituent, if skewed, will nevertheless be skewed systematically, and therefore measurements of expression level of the constituent may be compared meaningfully. In this fashion valuable information may be obtained and compared concerning expression of the constituent under varied circumstances.

[0109] In addition to the criterion of repeatability, it is desirable that a second criterion also be satisfied, namely that quantitative measurement of constituents is performed under conditions wherein efficiencies of amplification for all constituents are substantially similar as defined herein. When both of these criteria are satisfied, then measurement of the expression level of one constituent may be meaningfully compared with measurement of the expression level of another constituent in a given sample and from sample to sample.

[0110] The evaluation or characterization of colorectal cancer is defined to be diagnosing colorectal cancer, assessing the presence or absence of colorectal cancer, assessing the risk of developing colorectal cancer or assessing the prognosis of a subject with colorectal cancer, assessing the recurrence of colorectal cancer or assessing the presence or absence of a metastasis. Similarly, the evaluation or characterization of an agent for treatment of colorectal cancer includes identifying agents suitable for the treatment of colorectal cancer. The agents can be compounds known to treat colorectal cancer or compounds that have not been shown to treat colorectal cancer.

[0111] The agent to be evaluated or characterized for the treatment of colorectal cancer may be an alkylating agent (e.g., Cisplatin, Carboplatin, Oxaliplatin, BBR3464, Chlorambucil, Chlormethine, Cyclophosphamides, Ifosmade, Melphalan, Carmustine, Fotemustine, Lomustine, Streptozocin, Busulfan, Dacarbazine, Mechlorethamine, Procarbazine, Temozolomide, ThioTPA, and Uramustine); an anti-metabolite (e.g., purine (azathioprine, mercaptopurine), pyrimidine (Capecitabine, Cytarabine, Fluorouracil, Gemcitabine), and folic acid (Methotrexate, Pemetrexed, Raltitrexed)); a vinca alkaloid (e.g., Vincristine, Vinblastine, Vinorelbine, Vindesine); a taxane (e.g., paclitaxel, docetaxel, BMS-247550); an anthracycline (e.g., Daunorubicin, Doxorubicin, Epirubicin, Idarubicin, Mitoxantrone, Valrubicin, Bleomycin, Hydroxyurea, and Mitomycin); a topoisomerase inhibitor (e.g., Topotecan, Irinotecan Etoposide, and Teniposide); a monoclonal antibody (e.g., Alemtuzumab, Bevacizumab, Cetuximab, Gemtuzumab, Panitumumab, Rituximab, and Trastuzumab); a photosensitizer (e.g., Aminolevulinic acid, Methyl aminolevulinate, Porfimer sodium, and Verteporfin); a tyrosine kinase inhibitor (e.g., Gleevec™); an epidermal growth factor receptor inhibitor (e.g., Iressa™, erlotinib (Tarceva™), gefitinib); an FPTase inhibitor (e.g., FTIs (R115777, SCH66336, L-778,123)); a KDR inhibitor (e.g., SU6668, PTK787); a proteosome inhibitor (e.g., PS341); a TS/DNA synthesis inhibitor (e.g., ZD9331, Raltirexed (ZD1694, Tomudex), ZD9331, 5-FU)); an S-adenosyl-methionine decarboxylase inhibitor (e.g., SAM468A); a DNA methylating agent (e.g., TMZ); a DNA binding agent (e.g., PZA); an agent which binds and inactivates O⁶-alkylguanine AGT (e.g., BG); a c-raf-1 antisense oligo-deoxynucleotide (e.g., ISIS-5132 (CGP-69846A)); tumor immunotherapy (see Table 6); a steroidal and/or non-steroidal anti-inflammatory agent (e.g., corticosteroids, COX-2 inhibitors); or other agents such as Alitretinoin, Altretamine, Amsacrine, Anagrelide, Arsenic trioxide, Asparaginase, Bexarotene, Bortezomib, Celecoxib, Dasatinib, Denileukin Diftitox, Estramustine, Hydroxycarbamide, Imatinib, Pentostatin, Masoprocol, Mitotane, Pegaspargase, and Tretinoin.

[0112] Colorectal cancer and conditions related to colorectal cancer is evaluated by determining the level of expression (e.g., a quantitative measure) of an effective number (e.g., one or more) of constituents of a Gene Expression Panel (Precision Profile™) disclosed herein (i.e., Tables 1-5). By an effective number is meant the number of constituents that need to be measured in order to discriminate between a normal subject and a subject having colorectal cancer. Preferably the constituents are selected as to discriminate between a normal subject and a subject having colorectal cancer with at least 75% accuracy, more preferably 80%, 85%, 90%, 95%, 97%, 98%, 99% or greater accuracy.

[0113] The level of expression is determined by any means known in the art, such as for example quantitative PCR. The measurement is obtained under conditions that are substantially repeatable. Optionally, the qualitative measure of the constituent is compared to a reference or baseline level or value (e.g. a baseline profile set). In one embodiment, the reference or baseline level is a level of expression of one or more constituents in one or more subjects known not to be suffering from colorectal cancer (e.g., normal, healthy individual(s)). Alternatively, the reference or baseline level is derived from the level of expression of one or more constituents in one or more subjects known to be suffering from colorectal cancer. Optionally, the baseline level is derived from the same subject from which the first measure is derived. For example, the baseline is taken from a subject prior to receiving treatment or surgery for colorectal cancer, or at different time periods during a course of treatment. Such methods allow for the evaluation of a particular treatment for a selected individual. Comparison can be performed on test (e.g., patient) and reference samples (e.g., baseline) measured concurrently or at temporally distinct times. An example of the latter is the use of compiled expression information, e.g., a gene expression database, which assembles information about expression levels of cancer associated genes.

[0114] A reference or baseline level or value as used herein can be used interchangeably and is meant to be relative to a number or value derived from population studies, including without limitation, such subjects having similar age range, subjects in the same or similar ethnic group, sex, or, in female subjects, pre-menopausal or post-menopausal subjects, or relative to the starting sample of a subject undergoing treatment for colorectal cancer. Such reference values can be derived from statistical analyses and/or risk prediction data of populations obtained from mathematical algorithms and computed indices of colorectal cancer. Reference indices can also be constructed and used using algorithms and other methods of statistical and structural classification.

[0115] In one embodiment of the present invention, the reference or baseline value is the amount of expression of a cancer associated gene in a control sample derived from one or more subjects who are both asymptomatic and lack traditional laboratory risk factors for colorectal cancer.

[0116] In another embodiment of the present invention, the reference or baseline value is the level of cancer associated genes in a control sample derived from one or more subjects who are not at risk or at low risk for developing colorectal cancer.

[0117] In a further embodiment, such subjects are monitored and/or periodically retested for a diagnostically relevant period of time (“longitudinal studies”) following such test to verify continued absence from colorectal cancer (disease or event free survival). Such period of time may be one year, two years, two to five years, five years, five to ten years, ten years, or ten or more years from the initial testing date for determination of the reference or baseline value. Furthermore, retrospective measurement of cancer associated genes in properly banked historical subject samples may be used in establishing these reference or baseline values, thus shortening the study time required, presuming the subjects have been appropriately followed during the intervening period through the intended horizon of the product claim.

[0118] A reference or baseline value can also comprise the amounts of cancer associated genes derived from subjects who show an improvement in cancer status as a result of treatments and/or therapies for the cancer being treated and/or evaluated.

[0119] In another embodiment, the reference or baseline value is an index value or a baseline value. An index value or baseline value is a composite sample of an effective amount of cancer associated genes from one or more subjects who do not have cancer.

[0120] For example, where the reference or baseline level is comprised of the amounts of cancer associated genes derived from one or more subjects who have not been diagnosed with colorectal cancer, or are not known to be suffering from colorectal cancer, a change (e.g., increase or decrease) in the expression level of a cancer associated gene in the patient-derived sample as compared to the expression level of such gene in the reference or baseline level indicates that the subject is suffering from or is at risk of developing colorectal cancer. In contrast, when the methods are applied prophylacticly, a similar level of expression in the patient-derived sample of a colorectal cancer associated gene compared to such gene in the baseline level indicates that the subject is not suffering from or is at risk of developing colorectal cancer.

[0121] Where the reference or baseline level is comprised of the amounts of cancer associated genes derived from one or more subjects who have been diagnosed with colorectal cancer, or are known to be suffering from colorectal cancer, a similarity in the expression pattern in the patient-derived sample of a colorectal cancer gene compared to the colorectal cancer baseline level indicates that the subject is suffering from or is at risk of developing-colorectal cancer.

[0122] Expression of a colorectal cancer gene also allows for the course of treatment of colorectal cancer to be monitored. In this method, a biological sample is provided from a subject undergoing treatment, e.g., if desired, biological samples are obtained from the subject at various time points before, during, or after treatment. Expression of a colorectal cancer gene is then determined and compared to a reference or baseline profile. The baseline profile may be taken or derived from one or more individuals who have been exposed to the treatment. Alternatively, the baseline level may be taken or derived from one or more individuals who have not been exposed to the treatment. For example, samples may be collected from subjects who have received initial treatment for colorectal cancer and subsequent treatment for colorectal cancer to monitor the progress of the treatment.

[0123] Differences in the genetic makeup of individuals can result in differences in their relative abilities to metabolize various drugs. Accordingly, the Precision Profile™ for Colorectal Cancer (Table 1), the Precision Profile™ for Inflammatory Response (Table 2), the Human Cancer General Precision Profile™ (Table 3), the Precision Profile™ for EGR1 (Table 4), and the Cross-Cancer Precision Profile™ (Table 5), disclosed herein, allow for a putative therapeutic or prophylactic to be tested from a selected subject in order to determine if the agent is suitable for treating or preventing colorectal cancer in the subject. Additionally, other genes known to be associated with toxicity may be used. By suitable for treatment is meant determining whether the agent will be efficacious, not efficacious, or toxic for a particular individual. By toxic it is meant that the manifestations of one or more adverse effects of a drug when administered therapeutically. For example, a drug is toxic when it disrupts one or more normal physiological pathways.

[0124] To identify a therapeutic that is appropriate for a specific subject, a test sample from the subject is exposed to a candidate therapeutic agent, and the expression of one or more of colorectal cancer genes is determined. A subject sample is incubated in the presence of a candidate agent and the pattern of colorectal cancer gene expression in the test sample is measured and compared to a baseline profile, e.g., a colorectal cancer baseline profile or a non-colorectal cancer baseline profile or an index value. The test agent can be any compound or composition. For example, the test agent is a compound known to be useful in the treatment of colorectal cancer. Alternatively, the test agent is a compound that has not previously been used to treat colorectal cancer.

[0125] If the reference sample, e.g., baseline is from a subject that does not have colorectal cancer a similarity in the pattern of expression of colorectal cancer genes in the test sample compared to the reference sample indicates that the treatment is efficacious. Whereas a change in the pattern of expression of colorectal cancer genes in the test sample compared to the reference sample indicates a less favorable clinical outcome or prognosis. By “efficacious” is meant that the treatment leads to a decrease of a sign or symptom of colorectal cancer in the subject or a change in the pattern of expression of a colorectal cancer gene such that the gene expression pattern has an increase in similarity to that of a reference or baseline pattern. Assessment of colorectal cancer is made using standard clinical protocols. Efficacy is determined in association with any known method for diagnosing or treating colorectal cancer.

[0126] A Gene Expression Panel (Precision Profile™) is selected in a manner so that quantitative measurement of RNA or protein constituents in the Panel constitutes a measurement of a biological condition of a subject. In one kind of arrangement, a calibrated profile data set is employed. Each member of the calibrated profile data set is a function of (i) a measure of a distinct constituent of a Gene Expression Panel (Precision Profile™) and (ii) a baseline quantity.

[0127] Additional embodiments relate to the use of an index or algorithm resulting from quantitative measurement of constituents, and optionally in addition, derived from either expert analysis or computational biology (a) in the analysis of complex data sets; (b) to control or normalize the influence of uninformative or otherwise minor variances in gene expression values between samples or subjects; (c) to simplify the characterization of a complex data set for comparison to other complex data sets, databases or indices or algorithms derived from complex data sets; (d) to monitor a biological condition of a subject; (e) for measurement of therapeutic efficacy of natural or synthetic compositions or stimuli that may be formulated individually or in combinations or mixtures for a range of targeted biological conditions; (f) for predictions of toxicological effects and dose effectiveness of a composition or mixture of compositions for an individual or for a population or set of individuals or for a population of cells; (g) for determination of how two or more different agents administered in a single treatment might interact so as to detect any of synergistic, additive, negative, neutral of toxic activity (h) for performing pre-clinical and clinical trials by providing new criteria for pre-selecting subjects according to informative profile data sets for revealing disease status and conducting preliminary dosage studies for these patients prior to conducting Phase 1 or 2 trials.

[0128] Gene expression profiling and the use of index characterization for a particular condition or agent or both may be used to reduce the cost of Phase 3 clinical trials and may be used beyond Phase 3 trials; labeling for approved drugs; selection of suitable medication in a class of medications for a particular patient that is directed to their unique physiology; diagnosing or determining a prognosis of a medical condition or an infection which may precede onset of symptoms or alternatively diagnosing adverse side effects associated with administration of a therapeutic agent; managing the health care of a patient; and quality control for different batches of an agent or a mixture of agents.

### The Subject

[0129] The methods disclosed herein may be applied to cells of humans, mammals or other organisms without the need for undue experimentation by one of ordinary skill in the art because all cells transcribe RNA and it is known in the art how to extract RNA from all types of cells.

[0130] A subject can include those who have not been previously diagnosed as having colorectal cancer or a condition related to colorectal cancer. Alternatively, a subject can also include those who have already been diagnosed as having colorectal cancer or a condition related to colorectal cancer. Diagnosis of colorectal cancer is made, for example, from any one or combination of the following procedures: a medical history; physical exam; blood tests for anemia or tumor markers (e.g., carcinoembryonic antigen, or CA19-9); and one or more screening methods for polyps or abnormalities in the lining of the colorectal wall. Screening methods for polyps or abnormalities include but are not limited to: digital rectal examination (DRE); fecal occult blood test (FOBT); fecal immunochemical test (FIT); colonoscopy or sigmoidoscopy; barium enema with air contrast; virtual colonoscopy; biopsy (e.g., CT guided needle biopsy); and imaging techniques (e.g., ultrasound, CT scan, PET scan, and MRI).

[0131] Optionally, the subject has been previously treated with a surgical procedure for removing colorectal cancer or a condition related to colorectal cancer, including but not limited to any one or combination of the following treatments: laparoscopic surgery, colonic segmental resection, polypectomy and local excision to remove superficial cancer and polyps, local transanal resection, lower anterior or abdominoperineal resection, colo-anal anastomosis, coloplasty, abdominoperineal resection, pelvic exteneration, and urostomy. Optionally, the subject has previously been treated with a therapeutic agent such as radiation therapy (e.g., external beam radiation therapy, endocavitary radiation therapy, and brachytherapy), chemotherapy (e.g., 5-FU, Leucovorin, Capecitabine (Xeloda™), Irinotecan (Camptosar™), and/or Oxaliplatin (Eloxitan™)), and targeted therapies (e.g., Cetuximab (Erbitux™), or Bevacizumab (Avastin™)), alone, in combination, or in succession with a surgical procedure for removing colorectal cancer. Optionally, the subject may be treated with any of the agents previously described; alone, or in combination with a surgical procedure for removing colorectal cancer and/or radiation therapy as previously described.

[0132] A subject can also include those who are suffering from, or at risk of developing colorectal cancer or a condition related to colorectal cancer, such as those who exhibit known risk factors for colorectal cancer or conditions related to colorectal cancer. Known risk factors for colorectal cancer include, but are not limited to: age (increased chance after age 50); personal history of colorectal cancer, polyps, or chronic inflammatory bowel disease; ethnic background (Jews of Eastern European descent have higher rates of colorectal cancer); a diet mostly from animal sources (high in fat); physical inactivity; obesity; smoking (30-40% increased risk for colorectal cancer); high alcohol intake; and family history of colorectal cancer, hereditary polyposis colorectal cancer, or familial adenomatous polyposis.

### Selecting Constituents of a Gene Expression Panel (Precision Profile™)

[0133] The general approach to selecting constituents of a Gene Expression Panel (Precision Profile™) has been described in PCT application publication number WO 01/25473, incorporated herein in its entirety. A wide range of Gene Expression Panels (Precision Profiles™) have been designed and experimentally validated, each panel providing a quantitative measure of biological condition that is derived from a sample of blood or other tissue. For each panel, experiments have verified that a Gene Expression Profile using the panel's constituents is informative of a biological condition. (It has also been demonstrated that in being informative of biological condition, the Gene Expression Profile is used, among other things, to measure the effectiveness of therapy, as well as to provide a target for therapeutic intervention).

[0134] In addition to the Precision Profile™ for Colorectal Cancer (Table 1), the Precision Profile™ for Inflammatory Response (Table 2), the Human Cancer General Precision Profile™ (Table 3), the Precision Profile™ for EGR1 (Table 4), and the Cross-Cancer Precision Profile™ (Table 5), include relevant genes which may be selected for a given Precision Profiles™, such as the Precision Profiles™ demonstrated herein to be useful in the evaluation of colorectal cancer and conditions related to colorectal cancer.

### Inflammation and Cancer

[0135] Evidence has shown that cancer in adults arises frequently in the setting of chronic inflammation. Epidemiological and experimental studies provide strong support for the concept that inflammation facilitates malignant growth. Inflammatory components have been shown to 1) induce DNA damage, which contributes to genetic instability (e.g., cell mutation) and transformed cell proliferation (Balkwill and Mantovani, Lancet 357:539-545 (2001)); 2) promote angiogenesis, thereby enhancing tumor growth and invasiveness (Coussens L. M. and Z. Werb, Nature 429:860-867 (2002)); and 3) impair myelopoiesis and hemopoiesis, which cause immune dysfunction and inhibit immune surveillance (Kusmartsev and Gabrilovic, Cancer Immunol. Immunother. 51:293-298 (2002); Serafini et al., Cancer Immunol. Immunther. 53:64-72 (2004)).

[0136] Studies suggest that inflammation promotes malignancy via proinflammatory cytokines, including but not limited to IL-1β, which enhance immune suppression through the induction of myeloid suppressor cells, and that these cells down regulate immune surveillance and allow the outgrowth and proliferation of malignant cells by inhibiting the activation and/or function of tumor-specific lymphocytes. (Bunt et al., J. Immunol. 176: 284-290 (2006). Such studies are consistent with findings that myeloid suppressor cells are found in many cancer patients, including lung and breast cancer, and that chronic inflammation in some of these malignancies may enhance malignant growth (Coussens L. M. and Z. Werb, 2002).

[0137] Additionally, many cancers express an extensive repertoire of chemokines and chemokine receptors, and may be characterized by dis-regulated production of chemokines and abnormal chemokine receptor signaling and expression. Tumor-associated chemokines are thought to play several roles in the biology of primary and metastatic cancer such as: control of leukocyte infiltration into the tumor, manipulation of the tumor immune response, regulation of angiogenesis, autocrine or paracrine growth and survival factors, and control of the movement of the cancer cells. Thus, these activities likely contribute to growth within/outside the tumor microenvironment and to stimulate anti-tumor host responses.

[0138] As tumors progress, it is common to observe immune deficits not only within cells in the tumor microenvironment but also frequently in the systemic circulation. Whole blood contains representative populations of all the mature cells of the immune system as well as secretory proteins associated with cellular communications. The earliest observable changes of cellular immune activity are altered levels of gene expression within the various immune cell types. Immune responses are now understood to be a rich, highly complex tapestry of cell-cell signaling events driven by associated pathways and cascades—all involving modified activities of gene transcription. This highly interrelated system of cell response is immediately activated upon any immune challenge, including the events surrounding host response to colorectal cancer and treatment. Modified gene expression precedes the release of cytokines and other immunologically important signaling elements.

[0139] As such, inflammation genes, such as the genes listed in the Precision Profile™ for Inflammatory Response (Table 2) are useful for distinguishing between subjects suffering from colorectal cancer and normal subjects, in addition to the other gene panels, i.e., Precision Profiles™, described herein.

### Early Growth Response Gene Family and Cancer

[0140] The early growth response (EGR) genes are rapidly induced following mitogenic stimulation in diverse cell types, including fibroblasts, epithelial cells and B lymphocytes. The EGR genes are members of the broader “Immediate Early Gene” (IEG) family, whose genes are activated in the first round of response to extracellular signals such as growth factors and neurotransmitters, prior to new protein synthesis. The IEG's are well known as early regulators of cell growth and differentiation signals, in addition to playing a role in other cellular processes. Some other well characterized members of the IEG family include the c-myc, c-fos and c-jun oncogenes. Many of the immediate early gene products function as transcription factors and DNA-binding proteins, though other IEG's also include secreted proteins, cytoskeletal proteins and receptor subunits. EGR1 expression is induced by a wide variety of stimuli. It is rapidly induced by mitogens such as platelet derived growth factor (PDGF), fibroblast growth factor (FGF), and epidermal growth factor (EGF), as well as by modified lipoproteins, shear/mechanical stresses, and free radicals. Interestingly, expression of the EGR1 gene is also regulated by the oncogenes v-raf, v-fps and v-src as demonstrated in transfection analysis of cells using promoter-reporter constructs. This regulation is mediated by the serum response elements (SREs) present within the EGR1 promoter region. It has also been demonstrated that hypoxia, which occurs during development of cancers, induces EGR1 expression. EGR1 subsequently enhances the expression of endogenous EGFR, which plays an important role in cell growth (over-expression of EGFR can lead to transformation). Finally, EGR1 has also been shown to be induced by Smad3, a signaling component of the TGFB pathway.

[0141] In its role as a transcriptional regulator, the EGR1 protein binds specifically to the G+C rich EGR consensus sequence present within the promoter region of genes activated by EGR1. EGR1 also interacts with additional proteins (CREBBP/EP300) which co-regulate transcription of EGR1 activated genes. Many of the genes activated by EGR1 also stimulate the expression of EGR1, creating a positive feedback loop. Genes regulated by EGR1 include the mitogens: platelet derived growth factor (PDGFA), fibroblast growth factor (FGF), and epidermal growth factor (EGF) in addition to TNF, IL2, PLAU, ICAM1, TP53, ALOX5, PTEN, FN1 and TGFB1.

[0142] As such, early growth response genes, or genes associated therewith, such as the genes listed in the Precision Profile™ for EGR1 (Table 4) are useful for distinguishing between subjects suffering from colorectal cancer and normal subjects, in addition to the other gene panels, i.e., Precision Profiles™, described herein.

[0143] In general, panels may be constructed and experimentally validated by one of ordinary skill in the art in accordance with the principles articulated in the present application.

### Gene Expression Profiles Based on Gene Expression Panels of the Present Invention

[0144] Tables 1A-1C were derived from a study of the gene expression patterns described in Example 3 below. Table 1A describes all 1 and 2-gene logistic regression models based on genes from the Precision Profile™ for Colorectal Cancer (Table 1) which are capable of distinguishing between subjects suffering from colorectal cancer and normal subjects with at least 75% accuracy. For example, the first row of Table 1A, describes a 2-gene model, MSH6 and PSEN2, capable of correctly classifying colorectal cancer-afflicted subjects with 84.2% accuracy, and normal subjects with 87.5% accuracy.

[0145] Tables 2A-2C were derived from a study of the gene expression patterns described in Example 4 below. Table 2A describes all 1 and 2-gene logistic regression models based on genes from the Precision Profile™ for Inflammatory Response (Table 2), which are capable of distinguishing between subjects suffering from colorectal cancer and normal subjects with at least 75% accuracy. For example, the first row of Table 2A, describes a 2-gene model, HMOX1 and TXNRD1, capable of correctly classifying colorectal cancer-afflicted subjects with 94.4% accuracy, and normal subjects with 93.8% accuracy.

[0146] Tables 3A-3C were derived from a study of the gene expression patterns described in Example 5 below. Table 3A describes all 1 and 2-gene logistic regression models based on genes from the Human Cancer General Precision Profile™ (Table 3), which are capable of distinguishing between subjects suffering from colorectal cancer and normal subjects with at least 75% accuracy. For example, the first row of Table 3A, describes a 2-gene model, ATM and CDKN2A, capable of correctly classifying colorectal cancer-afflicted subjects with 91.3% accuracy, and normal subjects with 88% accuracy.

[0147] Tables 4A-4B were derived from a study of the gene expression patterns described in Example 6 below. Table 4A describes all 2-gene logistic regression models based on genes from the Precision Profile™ for EGR1 (Table 4), which are capable of distinguishing between subjects suffering from colorectal cancer and normal subjects with at least 75% accuracy. For example, the first row of Table 4A, describes a 2-gene model, NAB2 and TGFB1, capable of correctly classifying colorectal cancer-afflicted subjects with 81.8% accuracy, and normal subjects with 82% accuracy.

[0148] Tables 5A-5C were derived from a study of the gene expression patterns described in Example 7 below. Table 5A describes all 1 and 2-gene logistic regression models based on genes from the Cross-Cancer Precision Profile™ (Table 5), which are capable of distinguishing between subjects suffering from colorectal cancer and normal subjects with at least 75% accuracy. For example, the first row of Table 5A, describes a 2-gene model, AXIN2 and TNF, capable of correctly classifying colorectal cancer-afflicted subjects with 90.5% accuracy, and normal subjects with 93.9% accuracy.

### Design of Assays

[0149] Typically, a sample is run through a panel in replicates of three for each target gene (assay); that is, a sample is divided into aliquots and for each aliquot the concentrations of each constituent in a Gene Expression Panel (Precision Profile™) is measured. From over thousands of constituent assays, with each assay conducted in triplicate, an average coefficient of variation was found (standard deviation/average)*100, of less than 2 percent among the normalized ΔCt measurements for each assay (where normalized quantitation of the target mRNA is determined by the difference in threshold cycles between the internal control (e.g., an endogenous marker such as 18S rRNA, or an exogenous marker) and the gene of interest. This is a measure called “intra-assay variability”. Assays have also been conducted on different occasions using the same sample material. This is a measure of “inter-assay variability”. Preferably, the average coefficient of variation of intra-assay variability or inter-assay variability is less than 20%, more preferably less than 10%, more preferably less than 5%, more preferably less than 4%, more preferably less than 3%, more preferably less than 2%, and even more preferably less than 1%.

[0150] It has been determined that it is valuable to use the quadruplicate or triplicate test results to identify and eliminate data points that are statistical “outliers”; such data points are those that differ by a percentage greater, for example, than 3% of the average of all three or four values. Moreover, if more than one data point in a set of three or four is excluded by this procedure, then all data for the relevant constituent is discarded.

### Measurement of Gene Expression for a Constituent in the Panel

[0151] For measuring the amount of a particular RNA in a sample, methods known to one of ordinary skill in the art were used to extract and quantify transcribed RNA from a sample with respect to a constituent of a Gene Expression Panel (Precision Profile™). (See detailed protocols below. Also see PCT application publication number WO 98/24935 herein incorporated by reference for RNA analysis protocols). Briefly, RNA is extracted from a sample such as any tissue, body fluid, cell (e.g., circulating tumor cell) or culture medium which a population of cells of a subject might be growing. For example, cells may be lysed and RNA eluted in a suitable solution in which to conduct a DNAse reaction. Subsequent to RNA extraction, first strand synthesis may be performed using a reverse transcriptase. Gene amplification, more specifically quantitative PCR assays, can then be conducted and the gene of interest calibrated against an internal marker such as 18S rRNA (Hirayama et al., Blood 92, 1998: 46-52). Any other endogenous marker can be used, such as 28S-25S rRNA and 5S rRNA. Samples are measured in multiple replicates, for example, 3 replicates. In an embodiment of the invention, quantitative PCR is performed using amplification, reporting agents and instruments such as those supplied commercially by Applied Biosystems (Foster City, Calif.). Given a defined efficiency of amplification of target transcripts, the point (e.g., cycle number) that signal from amplified target template is detectable may be directly related to the amount of specific message transcript in the measured sample. Similarly, other quantifiable signals such as fluorescence, enzyme activity, disintegrations per minute, absorbance, etc., when correlated to a known concentration of target templates (e.g., a reference standard curve) or normalized to a standard with limited variability can be used to quantify the number of target templates in an unknown sample.

[0152] Although not limited to amplification methods, quantitative gene expression techniques may utilize amplification of the target transcript. Alternatively or in combination with amplification of the target transcript, quantitation of the reporter signal for an internal marker generated by the exponential increase of amplified product may also be used. Amplification of the target template may be accomplished by isothermic gene amplification strategies or by gene amplification by thermal cycling such as PCR.

[0153] It is desirable to obtain a definable and reproducible correlation between the amplified target or reporter signal, i.e., internal marker, and the concentration of starting templates. It has been discovered that this objective can be achieved by careful attention to, for example, consistent primer-template ratios and a strict adherence to a narrow permissible level of experimental amplification efficiencies (for example 80.0 to 100%+/−5% relative efficiency, typically 90.0 to 100%+/−5% relative efficiency, more typically 95.0 to 100%+/−2%, and most typically 98 to 100%+/−1% relative efficiency). In determining gene expression levels with regard to a single Gene Expression Profile, it is necessary that all constituents of the panels, including endogenous controls, maintain similar amplification efficiencies, as defined herein, to permit accurate and precise relative measurements for each constituent. Amplification efficiencies are regarded as being “substantially similar”, for the purposes of this description and the following claims, if they differ by no more than approximately 10%, preferably by less than approximately 5%, more preferably by less than approximately 3%, and more preferably by less than approximately 1%. Measurement conditions are regarded as being “substantially repeatable, for the purposes of this description and the following claims, if they differ by no more than approximately +/−10% coefficient of variation (CV), preferably by less than approximately +/−5% CV, more preferably +/−2% CV. These constraints should be observed over the entire range of concentration levels to be measured associated with the relevant biological condition. While it is thus necessary for various embodiments herein to satisfy criteria that measurements are achieved under measurement conditions that are substantially repeatable and wherein specificity and efficiencies of amplification for all constituents are substantially similar, nevertheless, it is within the scope of the present invention as claimed herein to achieve such measurement conditions by adjusting assay results that do not satisfy these criteria directly, in such a manner as to compensate for errors, so that the criteria are satisfied after suitable adjustment of assay results.

[0154] In practice, tests are run to assure that these conditions are satisfied. For example, the design of all primer-probe sets are done in house, experimentation is performed to determine which set gives the best performance. Even though primer-probe design can be enhanced using computer techniques known in the art, and notwithstanding common practice, it has been found that experimental validation is still useful. Moreover, in the course of experimental validation, the selected primer-probe combination is associated with a set of features:

[0155] The reverse primer should be complementary to the coding DNA strand. In one embodiment, the primer should be located across an intron-exon junction, with not more than four bases of the three-prime end of the reverse primer complementary to the proximal exon. (If more than four bases are complementary, then it would tend to competitively amplify genomic DNA.)

[0156] In an embodiment of the invention, the primer probe set should amplify cDNA of less than 110 bases in length and should not amplify, or generate fluorescent signal from, genomic DNA or transcripts or cDNA from related but biologically irrelevant loci.

[0157] A suitable target of the selected primer probe is first strand cDNA, which in one embodiment may be prepared from whole blood as follows:

[0158] (a) Use of Whole Blood for Ex Vivo Assessment of a Biological Condition

[0159] Human blood is obtained by venipuncture and prepared for assay. The aliquots of heparinized, whole blood are mixed with additional test therapeutic compounds and held at 37° C. in an atmosphere of 5% CO₂ for 30 minutes. Cells are lysed and nucleic acids, e.g., RNA, are extracted by various standard means.

[0160] Nucleic acids, RNA and or DNA, are purified from cells, tissues or fluids of the test population of cells. RNA is preferentially obtained from the nucleic acid mix using a variety of standard procedures (or RNA Isolation Strategies, pp. 55-104, in RNA Methodologies, A laboratory guide for isolation and characterization, 2nd edition, 1998, Robert E. Farrell, Jr., Ed., Academic Press), in the present using a filter-based RNA isolation system from Ambion (RNAqueous™, Phenol-free Total RNA Isolation Kit, Catalog #1912, version 9908; Austin, Tex.).

[0161] (b) Amplification Strategies.

[0162] Specific RNAs are amplified using message specific primers or random primers. The specific primers are synthesized from data obtained from public databases (e.g., Unigene, National Center for Biotechnology Information, National Library of Medicine, Bethesda, Md.), including information from genomic and cDNA libraries obtained from humans and other animals. Primers are chosen to preferentially amplify from specific RNAs obtained from the test or indicator samples (see, for example, RT PCR, Chapter 15 in RNA Methodologies, A Laboratory Guide for Isolation and Characterization, 2nd edition, 1998, Robert E. Farrell, Jr., Ed., Academic Press; or Chapter 22 pp. 143-151, RNA Isolation and Characterization Protocols, Methods in Molecular Biology, Volume 86, 1998, R. Rapley and D. L. Manning Eds., Human Press, or Chapter 14 Statistical refinement of primer design parameters; or Chapter 5, pp. 55-72, PCR Applications: protocols for functional genomics, M. A. Innis, D. H. Gelfand and J. J. Sninsky, Eds., 1999, Academic Press). Amplifications are carried out in either isothermic conditions or using a thermal cycler (for example, a ABI 9600 or 9700 or 7900 obtained from Applied Biosystems, Foster City, Calif.; see Nucleic acid detection methods, pp. 1-24, in Molecular Methods for Virus Detection, D. L. Wiedbrauk and D. H., Farkas, Eds., 1995, Academic Press). Amplified nucleic acids are detected using fluorescent-tagged detection oligonucleotide probes (see, for example, Taqman™ PCR Reagent Kit, Protocol, part number 402823, Revision A, 1996, Applied Biosystems, Foster City Calif.) that are identified and synthesized from publicly known databases as described for the amplification primers.

[0163] For example, without limitation, amplified cDNA is detected and quantified using detection systems such as the ABI Prism®7900 Sequence Detection System (Applied Biosystems (Foster City, Calif.)), the Cepheid SmartCycler® and Cepheid GeneXpert® Systems, the Fluidigm BioMark™ System, and the Roche LightCycler® 480 Real-Time PCR System. Amounts of specific RNAs contained in the test sample can be related to the relative quantity of fluorescence observed (see for example, Advances in Quantitative PCR Technology: 5′ Nuclease Assays, Y. S. Lie and C. J. Petropolus, Current Opinion in Biotechnology, 1998, 9:43-48, or Rapid Thermal Cycling and PCR Kinetics, pp. 211-229, chapter 14 in PCR applications: protocols for functional genomics, M. A. Innis, D. H. Gelfand and J. J. Sninsky, Eds., 1999, Academic Press). Examples of the procedure used with several of the above-mentioned detection systems are described below. In some embodiments, these procedures can be used for both whole blood RNA and RNA extracted from cultured cells (e.g., without limitation, CTCs, and CECs). In some embodiments, any tissue, body fluid, or cell(s) (e.g., circulating tumor cells (CTCs) or circulating endothelial cells (CECs)) may be used for ex vivo assessment of a biological condition affected by an agent. Methods herein may also be applied using proteins where sensitive quantitative techniques, such as an Enzyme Linked ImmunoSorbent Assay (ELISA) or mass spectroscopy, are available and well-known in the art for measuring the amount of a protein constituent (see WO 98/24935 herein incorporated by reference).

[0164] An example of a procedure for the synthesis of first strand cDNA for use in PCR amplification is as follows:

[0165] Materials

[0166] 1. Applied Biosystems TAQMAN Reverse Transcription Reagents Kit (P/N 808-0234). Kit Components: 10× TaqMan RT Buffer, 25 mM Magnesium chloride, deoxyNTPs mixture, Random Hexamers, RNase Inhibitor, MultiScribe Reverse Transcriptase (50 U/mL) (2) RNase/DNase free water (DEPC Treated Water from Ambion (P/N 9915G), or equivalent).

[0167] Methods

[0168] 1. Place RNase Inhibitor and MultiScribe Reverse Transcriptase on ice immediately. All other reagents can be thawed at room temperature and then placed on ice.

[0169] 2. Remove RNA samples from −80° C. freezer and thaw at room temperature and then place immediately on ice.

[0170] 3. Prepare the following cocktail of Reverse Transcriptase Reagents for each 100 mL RT reaction (for multiple samples, prepare extra cocktail to allow for pipetting error):

| | |
|---|---|
| 1 reaction (mL) | 11X, e.g. 10 samples (μL) |

| | | | |
|---|---|---|---|
| 10X RT Buffer | 10.0 | 110.0 | |
| 25 mM MgCl₂ | 22.0 | 242.0 | |
| dNTPs | 20.0 | 220.0 | |
| Random Hexamers | 5.0 | 55.0 | |
| RNAse Inhibitor | 2.0 | 22.0 | |
| Reverse Transcriptase | 2.5 | 27.5 | |
| Water | 18.5 | 203.5 | |
| Total: | 80.0 | 880.0 | (80 μL per sample) |

[0171] 4. Bring each RNA sample to a total volume of 20 μL in a 1.5 mL microcentrifuge tube (for example, remove 10 μL RNA and dilute to 20 μL with RNase/DNase free water, for whole blood RNA use 20 μL total RNA) and add 80 μL RT reaction mix from step 5.2.3. Mix by pipetting up and down.

[0172] 5. Incubate sample at room temperature for 10 minutes.

[0173] 6. Incubate sample at 37° C. for 1 hour.

[0174] 7. Incubate sample at 90° C. for 10 minutes.

[0175] 8. Quick spin samples in microcentrifuge.

[0176] 9. Place sample on ice if doing PCR immediately, otherwise store sample at −20° C. for future use.

[0177] 10. PCR QC should be run on all RT samples using 18S and β-actin.

[0178] Following the synthesis of first strand cDNA, one particular embodiment of the approach for amplification of first strand cDNA by PCR, followed by detection and quantification of constituents of a Gene Expression Panel (Precision Profile™) is performed using the ABI Prism® 7900 Sequence Detection System as follows:

[0179] Materials

[0180] 1. 20× Primer/Probe Mix for each gene of interest.

[0181] 2. 20× Primer/Probe Mix for 18S endogenous control.

[0182] 3. 2× Taqman Universal PCR Master Mix.

[0183] 4. cDNA transcribed from RNA extracted from cells.

[0184] 5. Applied Biosystems 96-Well Optical Reaction Plates.

[0185] 6. Applied Biosystems Optical Caps, or optical-clear film.

[0186] 7. Applied Biosystem Prism® 7700 or 7900 Sequence Detector.

[0187] Methods

[0188] 1. Make stocks of each Primer/Probe mix containing the Primer/Probe for the gene of interest, Primer/Probe for 18S endogenous control, and 2× PCR Master Mix as follows. Make sufficient excess to allow for pipetting error e.g., approximately 10% excess. The following example illustrates a typical set up for one gene with quadruplicate samples testing two conditions (2 plates).

1X (1 well) (μL)

| | |
|---|---|
| 2X Master Mix | 7.5 |
| 20X 18S Primer/Probe Mix | 0.75 |
| 20X Gene of interest Primer/Probe Mix | 0.75 |
| Total | 9.0 |

[0189] 2. Make stocks of cDNA targets by diluting 95 μL of cDNA into 2000 μL of water. The amount of cDNA is adjusted to give Ct values between 10 and 18, typically between 12 and 16.

[0190] 3. Pipette 9 μL of Primer/Probe mix into the appropriate wells of an Applied Biosystems 384-Well Optical Reaction Plate.

[0191] 4. Pipette 10 μL of cDNA stock solution into each well of the Applied Biosystems 384-Well Optical Reaction Plate.

[0192] 5. Seal the plate with Applied Biosystems Optical Caps, or optical-clear film.

[0193] 6. Analyze the plate on the ABI Prism®7900 Sequence Detector.

[0194] In another embodiment of the invention, the use of the primer probe with the first strand cDNA as described above to permit measurement of constituents of a Gene Expression Panel (Precision Profile™) is performed using a QPCR assay on Cepheid SmartCycler® and GeneXpert® Instruments as follows:
[0195] I. To run a QPCR assay in duplicate on the Cepheid SmartCycler® instrument containing three target genes and one reference gene, the following procedure should be followed.

[0196] A. With 20× Primer/Probe Stocks.

[0197] Materials
[0198] 1. SmartMix™-HM lyophilized Master Mix.
[0199] 2. Molecular grade water.
[0200] 3. 20× Primer/Probe Mix for the 18S endogenous control gene. The endogenous control gene will be dual labeled with VIC-MGB or equivalent.
[0201] 4. 20× Primer/Probe Mix for each for target gene one, dual labeled with FAM-BHQ1 or equivalent.
[0202] 5. 20× Primer/Probe Mix for each for target gene two, dual labeled with Texas Red-BHQ2 or equivalent.
[0203] 6. 20× Primer/Probe Mix for each for target gene three, dual labeled with Alexa 647-BHQ3 or equivalent.
[0204] 7. Tris buffer, pH 9.0
[0205] 8. cDNA transcribed from RNA extracted from sample.
[0206] 9. SmartCycler® 25 μL tube.
[0207] 10. Cepheid SmartCycler® instrument.

[0208] Methods
[0209] 1. For each cDNA sample to be investigated, add the following to a sterile 650 μL tube.

| | | |
|---|---|---|
| SmartMix ™-HM lyophilized Master Mix | 1 | bead |
| 20X 18S Primer/Probe Mix | 2.5 | μL |
| 20X Target Gene 1 Primer/Probe Mix | 2.5 | μL |
| 20X Target Gene 2 Primer/Probe Mix | 2.5 | μL |
| 20X Target Gene 3 Primer/Probe Mix | 2.5 | μL |
| Tris Buffer, pH 9.0 | 2.5 | μL |
| Sterile Water | 34.5 | μL |
| Total | 47 | μL |

Vortex the mixture for 1 second three times to completely mix the reagents. Briefly centrifuge the tube after vortexing.
[0210] 2. Dilute the cDNA sample so that a 3 μL addition to the reagent mixture above will give an 18S reference gene CT value between 12 and 16.
[0211] 3. Add 3 μL of the prepared cDNA sample to the reagent mixture bringing the total volume to 50 μL. Vortex the mixture for 1 second three times to, completely mix the reagents. Briefly centrifuge the tube after vortexing.
[0212] 4. Add 25 μL of the mixture to each of two SmartCycler® tubes, cap the tube and spin for 5 seconds in a microcentrifuge having an adapter for SmartCycler® tubes.
[0213] 5. Remove the two SmartCycler® tubes from the microcentrifuge and inspect for air bubbles. If bubbles are present, re-spin, otherwise, load the tubes into the SmartCycler® instrument.
[0214] 6. Run the appropriate QPCR protocol on the SmartCycler®, export the data and analyze the results.

[0215] B. With Lyophilized SmartBeads™.

[0216] Materials
[0217] 1. SmartMix™-HM lyophilized Master Mix.
[0218] 2. Molecular grade water.
[0219] 3. SmartBeads™ containing the 18S endogenous control gene dual labeled with VIC-MGB or equivalent, and the three target genes, one dual labeled with FAM-BHQ1 or equivalent, one dual labeled with Texas Red-BHQ2 or equivalent and one dual labeled with Alexa 647-BHQ3 or equivalent.
[0220] 4. Tris buffer, pH 9.0
[0221] 5. cDNA transcribed from RNA extracted from sample.
[0222] 6. SmartCycler® 25 μL tube.
[0223] 7. Cepheid SmartCycler® instrument.

[0224] Methods
[0225] 1. For each cDNA sample to be investigated, add the following to a sterile 650 μL tube.

| | | |
|---|---|---|
| SmartMix ™-HM lyophilized Master Mix | 1 | bead |
| SmartBead ™ containing four primer/probe sets | 1 | bead |
| Tris Buffer, pH 9.0 | 2.5 | μL |
| Sterile Water | 44.5 | μL |
| Total | 47 | μL |

Vortex the mixture for 1 second three times to completely mix the reagents. Briefly centrifuge the tube after vortexing.
[0226] 2. Dilute the cDNA sample so that a 3 μL addition to the reagent mixture above will give an 18S reference gene CT value between 12 and 16.,
[0227] 3. Add 3 μL of the prepared cDNA sample to the reagent mixture bringing the total volume to 50 μL. Vortex the mixture for 1 second three times to completely mix the reagents. Briefly centrifuge the tube after vortexing.
[0228] 4. Add 25 μL of the mixture to each of two SmartCycler® tubes, cap the tube and spin for 5 seconds in a microcentrifuge having an adapter for SmartCycler® tubes.
[0229] 5. Remove the two SmartCycler®tubes from the microcentrifuge and inspect for air bubbles. If bubbles are present, re-spin, otherwise, load the tubes into the SmartCycler® instrument.
[0230] 6. Run the appropriate QPCR protocol on the SmartCycler®, export the data and analyze the results.
[0231] II. To run a QPCR assay on the Cepheid GeneXpert® instrument containing three target genes and one reference gene, the following procedure should be followed. Note that to do duplicates, two self contained cartridges need to be loaded and run on the GeneXpert® instrument.

[0232] Materials
[0233] 1. Cepheid GeneXpert® self contained cartridge preloaded with a lyophilized SmartMix™-HM master mix bead and a lyophilized SmartBead™ containing four primer/probe sets.
[0234] 2. Molecular grade water, containing Tris buffer, pH 9.0.
[0235] 3. Extraction and purification reagents.
[0236] 4. Clinical sample (whole blood, RNA, etc.)
[0237] 5. Cepheid GeneXpert® instrument.

[0238] Methods
[0239] 1. Remove appropriate GeneXpert® self contained cartridge from packaging.
[0240] 2. Fill appropriate chamber of self contained cartridge with molecular grade water with Tris buffer, pH 9.0.
[0241] 3. Fill appropriate chambers of self contained cartridge with extraction and purification reagents.
[0242] 4. Load aliquot of clinical sample into appropriate chamber of self contained cartridge.
[0243] 5. Seal cartridge and load into GeneXpert®instrument.
[0244] 6. Run the appropriate extraction and amplification protocol on the GeneXpert® and analyze the resultant data.

[0245] In yet another embodiment of the invention, the use of the primer probe with the first strand cDNA as described above to permit measurement of constituents of a Gene Expression Panel (Precision Profile™) is performed using a QPCR assay on the Roche LightCycler® 480 Real-Time PCR System as follows:

[0246] Materials
[0247] 1. 20× Primer/Probe stock for the 18S endogenous control gene. The endogenous control gene may be dual labeled with either VIC-MGB or VIC-TAMRA.
[0248] 2. 20× Primer/Probe stock for each target gene, dual labeled with either FAM-TAMRA or FAM-BHQ1.
[0249] 3. 2× LightCycler® 490 Probes Master (master mix).
[0250] 4. 1× cDNA sample stocks transcribed from RNA extracted from samples.
[0251] 5. 1× TE buffer, pH 8.0.
[0252] 6. LightCycler® 480 384-well plates.
[0253] 7. Source MDx 24 gene Precision Profile™ 96-well intermediate plates.
[0254] 8. RNase/DNase free 96-well plate.
[0255] 9. 1.5 mL microcentrifuge tubes.
[0256] 10. Beckman/Coulter Biomek® 3000 Laboratory Automation Workstation.
[0257] 11. Velocity 11 Bravo™ Liquid Handling Platform.
[0258] 12. LightCycler® 480 Real-Time PCR System.

[0259] Methods
[0260] 1. Remove a Source MDx 24 gene Precision Profile™ 96-well intermediate plate from the freezer, thaw and spin in a plate centrifuge.
[0261] 2. Dilute four (4) 1× cDNA sample stocks in separate 1.5 mL microcentrifuge tubes with the total final volume for each of 540 μL.
[0262] 3. Transfer the 4 diluted cDNA samples to an empty RNase/DNase free 96-well plate using the Biomek® 3000 Laboratory Automation Workstation.
[0263] 4. Transfer the cDNA samples from the cDNA plate created in step 3 to the thawed and centrifuged Source MDx 24 gene Precision Profile™ 96-well intermediate plate using Biomek® 3000 Laboratory Automation Workstation. Seal the plate with a foil seal and spin in a plate centrifuge.
[0264] 5. Transfer the contents of the cDNA-loaded Source MDx 24 gene Precision Profile™ 96-well intermediate plate to a new LightCycler® 480 384-well plate using the Bravo™ Liquid Handling Platform. Seal the 384-well plate with a LightCycler® 480 optical sealing foil and spin in a plate centrifuge for 1 minute at 2000 rpm.
[0265] 6. Place the sealed in a dark 4° C. refrigerator for a minimum of 4 minutes.
[0266] 7. Load the plate into the LightCycler® 480 Real-Time PCR System and start the LightCycler® 480 software. Chose the appropriate run parameters and start the run.
[0267] 8. At the conclusion of the run, analyze the data and export the resulting CP values to the database.

[0268] In some instances, target gene FAM measurements may be beyond the detection limit of the particular platform instrument used to detect and quantify constituents of a Gene Expression Panel (Precision Profile™). To address the issue of “undetermined” gene expression measures as lack of expression for a particular gene, the detection limit may be reset and the “undetermined” constituents may be “flagged”. For example without limitation, the ABI Prism® 7900HT Sequence Detection System reports target gene FAM measurements that are beyond the detection limit of the instrument (>40 cycles) as “undetermined”. Detection Limit Reset is performed when at least 1 of 3 target gene FAM C_{T} replicates are not detected after 40 cycles and are designated as “undetermined”. “Undetermined” target gene FAM C_{T} replicates are re-set to 40 and flagged. C_{T} normalization (Δ C_{T}) and relative expression calculations that have used re-set FAM C_{T} values are also flagged.

### Baseline Profile Data Sets

[0269] The analyses of samples from single individuals and from large groups of individuals provide a library of profile data sets relating to a particular panel or series of panels. These profile data sets may be stored as records in a library for use as baseline profile data sets. As the term “baseline” suggests, the stored baseline profile data sets serve as comparators for providing a calibrated profile data set that is informative about a biological condition or agent. Baseline profile data sets may be stored in libraries and classified in a number of cross-referential ways. One form of classification may rely on the characteristics of the panels from which the data sets are derived. Another form of classification may be by particular biological condition, e.g., colorectal cancer. The concept of a biological condition encompasses any state in which a cell or population of cells may be found at any one time. This state may reflect geography of samples, sex of subjects or any other discriminator. Some of the discriminators may overlap. The libraries may also be accessed for records associated with a single subject or particular clinical trial. The classification of baseline profile data sets may further be annotated with medical information about a particular subject, a medical condition, and/or a particular agent.

[0270] The choice of a baseline profile data set for creating a calibrated profile data set is related to the biological condition to be evaluated, monitored, or predicted, as well as, the intended use of the calibrated panel, e.g., as to monitor drug development, quality control or other uses. It may be desirable to access baseline profile data sets from the same subject for whom a first profile data set is obtained or from different subject at varying times, exposures to stimuli, drugs or complex compounds; or may be derived from like or dissimilar populations or sets of subjects. The baseline profile data set may be normal, healthy baseline.

[0271] The profile data set may arise from the same subject for which the first data set is obtained, where the sample is taken at a separate or similar time, a different or similar site or in a different or similar biological condition. For example, a sample may be taken before stimulation or after stimulation with an exogenous compound or substance, such as before or after therapeutic treatment. Alternatively the sample is taken before or include before or after a surgical procedure for colorectal cancer. The profile data set obtained from the unstimulated sample may serve as a baseline profile data set for the sample taken after stimulation. The baseline data set may also be derived from a library containing profile data sets of a population or set of subjects having some defining characteristic or biological condition. The baseline profile data set may also correspond to some ex vivo or in vitro properties associated with an in vitro cell culture. The resultant calibrated profile data sets may then be stored as a record in a database or library along with or separate from the baseline profile data base and optionally the first profile data set al. though the first profile data set would normally become incorporated into a baseline profile data set under suitable classification criteria. The remarkable consistency of Gene Expression Profiles associated with a given biological condition makes it valuable to store profile data, which can be used, among other things for normative reference purposes. The normative reference can serve to indicate the degree to which a subject conforms to a given biological condition (healthy or diseased) and, alternatively or in addition, to provide a target for clinical intervention.

### Calibrated Data

[0272] Given the repeatability achieved in measurement of gene expression, described above in connection with “Gene Expression Panels” (Precision Profiles™) and “gene amplification”, it was concluded that where differences occur in measurement under such conditions, the differences are attributable to differences in biological condition. Thus, it has been found that calibrated profile data sets are highly reproducible in samples taken from the same individual under the same conditions. Similarly, it has been found that calibrated profile data sets are reproducible in samples that are repeatedly tested. Also found have been repeated instances wherein calibrated profile data sets obtained when samples from a subject are exposed ex vivo to a compound are comparable to calibrated profile data from a sample that has been exposed to a sample in vivo.

### Calculation of Calibrated Profile Data Sets and Computational Aids

[0273] The calibrated profile data set may be expressed in a spreadsheet or represented graphically for example, in a bar chart or tabular form but may also be expressed in a three dimensional representation. The function relating the baseline and profile data may be a ratio expressed as a logarithm. The constituent may be itemized on the x-axis and the logarithmic scale may be on the y-axis. Members of a calibrated data set may be expressed as a positive value representing a relative enhancement of gene expression or as a negative value representing a relative reduction in gene expression with respect to the baseline.

[0274] Each member of the calibrated profile data set should be reproducible within a range with respect to similar samples taken from the subject under similar conditions. For example, the calibrated profile data sets may be reproducible within 20%, and typically within 10%. In accordance with embodiments of the invention, a pattern of increasing, decreasing and no change in relative gene expression from each of a plurality of gene loci examined in the Gene Expression Panel (Precision Profile™) may be used to prepare a calibrated profile set that is informative with regards to a biological condition, biological efficacy of an agent treatment conditions or for comparison to populations or sets of subjects or samples, or for comparison to populations of cells. Patterns of this nature may be used to identify likely candidates for a drug trial, used alone or in combination with other clinical indicators to be diagnostic or prognostic with respect to a biological condition or may be used to guide the development of a pharmaceutical or nutraceutical through manufacture, testing and marketing.

[0275] The numerical data obtained from quantitative gene expression and numerical data from calibrated gene expression relative to a baseline profile data set may be stored in databases or digital storage mediums and may be retrieved for purposes including managing patient health care or for conducting clinical trials or for characterizing a drug. The data may be transferred in physical or wireless networks via the World Wide Web, email, or internet access site for example or by hard copy so as to be collected and pooled from distant geographic sites.

[0276] The method also includes producing a calibrated profile data set for the panel, wherein each member of the calibrated profile data set is a function of a corresponding member of the first profile data set and a corresponding member of a baseline profile data set for the panel, and wherein the baseline profile data set is related to the colorectal cancer or conditions related to colorectal cancer to be evaluated, with the calibrated profile data set being a comparison between the first profile data set and the baseline profile data set, thereby providing evaluation of colorectal cancer or conditions related to colorectal cancer of the subject.

[0277] In yet other embodiments, the function is a mathematical function and is other than a simple difference, including a second function of the ratio of the corresponding member of first profile data set to the corresponding member of the baseline profile data set, or a logarithmic function. In such embodiments, the first sample is obtained and the first profile data set quantified at a first location, and the calibrated profile data set is produced using a network to access a database stored on a digital storage medium in a second location, wherein the database may be updated to reflect the first profile data set quantified from the sample. Additionally, using a network may include accessing a global computer network.

[0278] In an embodiment of the present invention, a descriptive record is stored in a single database or multiple databases where the stored data includes the raw gene expression data (first profile data set) prior to transformation by use of a baseline profile data set, as well as a record of the baseline profile data set used to generate the calibrated profile data set including for example, annotations regarding whether the baseline profile data set is derived from a particular Signature Panel and any other annotation that facilitates interpretation and use of the data.

[0279] Because the data is in a universal format, data handling may readily be done with a computer. The data is organized so as to provide an output optionally corresponding to a graphical representation of a calibrated data set.

[0280] The above described data storage on a computer may provide the information in a form that can be accessed by a user. Accordingly, the user may load the information onto a second access site including downloading the information. However, access may be restricted to users having a password or other security device so as to protect the medical records contained within. A feature of this embodiment of the invention is the ability of a user to add new or annotated records to the data set so the records become part of the biological information.

[0281] The graphical representation of calibrated profile data sets pertaining to a product such as a drug provides an opportunity for standardizing a product by means of the calibrated profile, more particularly a signature profile. The profile may be used as a feature with which to demonstrate relative efficacy, differences in mechanisms of actions, etc. compared to other drugs approved for similar or different uses.

[0282] The various embodiments of the invention may be also implemented as a computer program product for use with a computer system. The product may include program code for deriving a first profile data set and for producing calibrated profiles. Such implementation may include a series of computer instructions fixed either on a tangible medium, such as a computer readable medium (for example, a diskette, CD-ROM, ROM, or fixed disk), or transmittable to a computer system via a modem or other interface device, such as a communications adapter coupled to a network. The network coupling may be for example, over optical or wired communications lines or via wireless techniques (for example, microwave, infrared or other transmission techniques) or some combination of these. The series of computer instructions preferably embodies all or part of the functionality previously described herein with respect to the system. Those skilled in the art should appreciate that such computer instructions can be written in a number of programming languages for use with many computer architectures or operating systems. Furthermore, such instructions may be stored in any memory device, such as semiconductor, magnetic, optical or other memory devices, and may be transmitted using any communications technology, such as optical, infrared, microwave, or other transmission technologies. It is expected that such a computer program product may be distributed as a removable medium with accompanying printed or electronic documentation (for example, shrink wrapped software), preloaded with a computer system (for example, on system ROM or fixed disk), or distributed from a server or electronic bulletin board over a network (for example, the Internet or World Wide Web). In addition, a computer system is further provided including derivative modules for deriving a first data set and a calibration profile data set.

[0283] The calibration profile data sets in graphical or tabular form, the associated databases, and the calculated index or derived algorithm, together with information extracted from the panels, the databases, the data sets or the indices or algorithms are commodities that can be sold together or separately for a variety of purposes as described in WO 01/25473.

[0284] In other embodiments, a clinical indicator may be used to assess the colorectal cancer or conditions related to colorectal cancer of the relevant set of subjects by interpreting the calibrated profile data set in the context of at least one other clinical indicator, wherein the at least one other clinical indicator is selected from the group consisting of blood chemistry, X-ray or other radiological or metabolic imaging technique, molecular markers in the blood (e.g., carcinoembryonic antigen, CA19-9), other chemical assays, and physical findings.

### Index Construction

[0285] In combination, (i) the remarkable consistency of Gene Expression Profiles with respect to a biological condition across a population or set of subject or samples, or across a population of cells and (ii) the use of procedures that provide substantially reproducible measurement of constituents in a Gene Expression Panel (Precision Profile™) giving rise to a Gene Expression Profile, under measurement conditions wherein specificity and efficiencies of amplification for all constituents of the panel are substantially similar, make possible the use of an index that characterizes a Gene Expression Profile, and which therefore provides a measurement of a biological condition.

[0286] An index may be constructed using an index function that maps values in a Gene Expression Profile into a single value that is pertinent to the biological condition at hand. The values in a Gene Expression Profile are the amounts of each constituent of the Gene Expression Panel (Precision Profile™). These constituent amounts form a profile data set, and the index function generates a single value—the index—from the members of the profile data set.

[0287] The index function may conveniently be constructed as a linear sum of terms, each term being what is referred to herein as a “contribution function” of a member of the profile data set. For example, the contribution function may be a constant times a power of a member of the profile data set. So the index function would have the form

I=ΣciMi^{P(i)},

[0288] where I is the index, Mi is the value of the member i of the profile data set, Ci is a constant, and P(i) is a power to which Mi is raised, the sum being formed for all integral values of i up to the number of members in the data set. We thus have a linear polynomial expression. The role of the coefficient Ci for a particular gene expression specifies whether a higher ΔCt value for this gene either increases (a positive Ci) or decreases (a lower value) the likelihood of colorectal cancer, the ΔCt values of all other genes in the expression being held constant.

[0289] The values Ci and P(i) may be determined in a number of ways, so that the index I is informative of the pertinent biological condition. One way is to apply statistical techniques, such as latent class modeling, to the profile data sets to correlate clinical data or experimentally derived data, or other data pertinent to the biological condition. In this connection, for example, may be employed the software from Statistical Innovations, Belmont, Mass., called Latent Gold®. Alternatively, other simpler modeling techniques may be employed in a manner known in the art. The index function for colorectal cancer may be constructed, for example, in a manner that a greater degree of colorectal cancer (as determined by the profile data set for the any of the Precision Profiles™ (listed in Tables 1-5) described herein) correlates with a large value of the index function.

[0290] Just as a baseline profile data set, discussed above, can be used to provide an appropriate normative reference, and can even be used to create a Calibrated profile data set, as discussed above, based on the normative reference, an index that characterizes a Gene Expression Profile can also be provided with a normative value of the index function used to create the index. This normative value can be determined with respect to a relevant population or set of subjects or samples or to a relevant population of cells, so that the index may be interpreted in relation to the normative value. The relevant population or set of subjects or samples, or relevant population of cells may have in common a property that is at least one of age range, gender, ethnicity, geographic location, nutritional history, medical condition, clinical indicator, medication, physical activity, body mass, and environmental exposure.

[0291] As an example, the index can be constructed, in relation to a normative Gene Expression Profile for a population or set of healthy subjects, in such a way that a reading of approximately 1 characterizes normative Gene Expression Profiles of healthy subjects. Let us further assume that the biological condition that is the subject of the index is colorectal cancer; a reading of 1 in this example thus corresponds to a Gene Expression Profile that matches the norm for healthy subjects. A substantially higher reading then may identify a subject experiencing colorectal cancer, or a condition related to colorectal cancer. The use of 1 as identifying a normative value, however, is only one possible choice; another logical choice is to use 0 as identifying the normative value. With this choice, deviations in the index from zero can be indicated in standard deviation units (so that values lying between −1 and +1 encompass 90% of a normally distributed reference population or set of subjects. Since it was determined that Gene Expression Profile values (and accordingly constructed indices based on them) tend to be normally distributed, the 0-centered index constructed in this manner is highly informative. It therefore facilitates use of the index in diagnosis of disease and setting objectives for treatment.

[0292] Still another embodiment is a method of providing an index pertinent to colorectal cancer or conditions related to colorectal cancer of a subject based on a first sample from the subject, the first sample providing a source of RNAs, the method comprising deriving from the first sample a profile data set, the profile data set including a plurality of members, each member being a quantitative measure of the amount of a distinct RNA constituent in a panel of constituents selected so that measurement of the constituents is indicative of the presumptive signs of colorectal cancer, the panel including at least one of any of the genes listed in the Precision Profiles™ (listed in Tables 1-5). In deriving the profile data set, such measure for each constituent is achieved under measurement conditions that are substantially repeatable, at least one measure from the profile data set is applied to an index function that provides a mapping from at least one measure of the profile data set into one measure of the presumptive signs of colorectal cancer, so as to produce an index pertinent to the colorectal cancer or conditions related to colorectal cancer of the subject.

[0293] As another embodiment of the invention, an index function I of the form

I=C₀ΣCᵢM_{Ii}^{P1(i)}M₂ᵢ^{P2(i)},

can be employed, where M₁ and M₂ are values of the member i of the profile data set, Cᵢ is a constant determined without reference to the profile data set, and P1 and P2 are powers to which M₁ and M₂ are raised. The role of P1(i) and P2(i) is to specify the specific functional form of the quadratic expression, whether in fact the equation is linear, quadratic, contains cross-product terms, or is constant. For example, when P1=P2=0, the index function is simply the sum of constants; when P1=1 and P2=0, the index function is a linear expression; when P1=P2=1, the index function is a quadratic expression.

[0294] The constant C₀ serves to calibrate this expression to the biological population of interest that is characterized by having colorectal cancer. In this embodiment, when the index value equals 0, the odds are 50:50 of the subject having colorectal cancer vs a normal subject. More generally, the predicted odds of the subject having colorectal cancer is [exp(Iᵢ)], and therefore the predicted probability of having colorectal cancer is [exp(Iᵢ)]/[1+exp((Iᵢ)]. Thus, when the index exceeds 0, the predicted probability that a subject has colorectal cancer is higher than 0.5, and when it falls below 0, the predicted probability is less than 0.5.

[0295] The value of C₀ may be adjusted to reflect the prior probability of being in this population based on known exogenous risk factors for the subject. In an embodiment where C₀ is adjusted as a function of the subject's risk factors, where the subject has prior probability pᵢ of having colorectal cancer based on such risk factors, the adjustment is made by increasing (decreasing) the unadjusted C₀ value by adding to C₀ the natural logarithm of the following ratio: the prior odds of having colorectal cancer taking into account the risk factors/the overall prior odds of having colorectal cancer without taking into account the risk factors.

### Performance and Accuracy Measures of the Invention

[0296] The performance and thus absolute and relative clinical usefulness of the invention may be assessed in multiple ways as noted above. Amongst the various assessments of performance, the invention is intended to provide accuracy in clinical diagnosis and prognosis. The accuracy to of a diagnostic or prognostic test, assay, or method concerns the ability of the test, assay, or method to distinguish between subjects having colorectal cancer is based on whether the subjects have an “effective amount” or a “significant alteration” in the levels of a cancer associated gene. By “effective amount” or “significant alteration”, it is meant that the measurement of an appropriate number of cancer associated gene (which may be one or more) is different than the predetermined cut-off point (or threshold value) for that cancer associated gene and therefore indicates that the subject has colorectal cancer for which the cancer associated gene(s) is a determinant.

[0297] The difference in the level of cancer associated gene(s) between normal and abnormal is preferably statistically significant. As noted below, and without any limitation of the invention, achieving statistical significance, and thus the preferred analytical and clinical accuracy, generally but not always requires that combinations of several cancer associated gene(s) be used together in panels and combined with mathematical algorithms in order to achieve a statistically significant cancer associated gene index.

[0298] In the categorical diagnosis of a disease state, changing the cut point or threshold value of a test (or assay) usually changes the sensitivity and specificity, but in a qualitatively inverse relationship. Therefore, in assessing the accuracy and usefulness of a proposed medical test, assay, or method for assessing a subject's condition, one should always take both sensitivity and specificity into account and be mindful of what the cut point is at which the sensitivity and specificity are being reported because sensitivity and specificity may vary significantly over the range of cut points. Use of statistics such as AUC, encompassing all potential cut point values, is preferred for most categorical risk measures using the invention, while for continuous risk measures, statistics of goodness-of-fit and calibration to observed results or other gold standards, are preferred.

[0299] Using such statistics, an “acceptable degree of diagnostic accuracy”, is herein defined as a test or assay (such as the test of the invention for determining an effective amount or a significant alteration of cancer associated gene(s), which thereby indicates the presence of a colorectal cancer in which the AUC (area under the ROC curve for the test or assay) is at least 0.60, desirably at least 0.65, more desirably at least 0.70, preferably at least 0.75, more preferably at least 0.80, and most preferably at least 0.85.

[0300] By a “very high degree of diagnostic accuracy”, it is meant a test or assay in which the AUC (area under the ROC curve for the test or assay) is at least 0.75, desirably at least 0.775, more desirably at least 0.800, preferably at least 0.825, more preferably at least 0.850, and most preferably at least 0.875.

[0301] The predictive value of any test depends on the sensitivity and specificity of the test, and on the prevalence of the condition in the population being tested. This notion, based on Bayes' theorem, provides that the greater the likelihood that the condition being screened for is present in an individual or in the population (pre-test probability), the greater the validity of a positive test and the greater the likelihood that the result is a true positive. Thus, the problem with using a test in any population where there is a low likelihood of the condition being present is that a positive result has limited value (i.e., more likely to be a false positive). Similarly, in populations at very high risk, a negative test result is more likely to be a false negative.

[0302] As a result, ROC and AUC can be misleading as to the clinical utility of a test in low disease prevalence tested populations (defined as those with less than 1% rate of occurrences (incidence) per annum, or less than 10% cumulative prevalence over a specified time horizon). Alternatively, absolute risk and relative risk ratios as defined elsewhere in this disclosure can be employed to determine the degree of clinical utility. Populations of subjects to be tested can also be categorized into quartiles by the test's measurement values, where the top quartile (25% of the population) comprises the group of subjects with the highest relative risk for developing colorectal cancer, and the bottom quartile comprising the group of subjects having the lowest relative risk for developing colorectal cancer. Generally, values derived from tests or assays having over 2.5 times the relative risk from top to bottom quartile in a low prevalence population are considered to have a “high degree of diagnostic accuracy,” and those with five to seven times the relative risk for each quartile are considered to have a “very high degree of diagnostic accuracy.” Nonetheless, values derived from tests or assays having only 1.2 to 2.5 times the relative risk for each quartile remain clinically useful are widely used as risk factors for a disease. Often such lower diagnostic accuracy tests must be combined with additional parameters in order to derive meaningful clinical thresholds for therapeutic intervention, as is done with the aforementioned global risk assessment indices.

[0303] A health economic utility function is yet another means of measuring the performance and clinical value of a given test, consisting of weighting the potential categorical test outcomes based on actual measures of clinical and economic value for each. Health economic performance is closely related to accuracy, as a health economic utility function specifically assigns an economic value for the benefits of correct classification and the costs of misclassification of tested subjects. As a performance measure, it is not unusual to require a test to achieve a level of performance which results in an increase in health economic value per test (prior to testing costs) in excess of the target price of the test.

[0304] In general, alternative methods of determining diagnostic accuracy are commonly used for continuous measures, when a disease category or risk category (such as those at risk for having a bone fracture) has not yet been clearly defined by the relevant medical societies and practice of medicine, where thresholds for therapeutic use are not yet established, or where there is no existing gold standard for diagnosis of the pre-disease. For continuous measures of risk, measures of diagnostic accuracy for a calculated index are typically based on curve fit and calibration between the predicted continuous value and the actual observed values (or a historical index calculated value) and utilize measures such as R squared, Hosmer-Lemeshow P-value statistics and confidence intervals. It is not unusual for predicted values using such algorithms to be reported including a confidence interval (usually 90% or 95% CI) based on a historical observed cohort's predictions, as in the test for risk of future breast cancer recurrence commercialized by Genomic Health, Inc. (Redwood City, Calif.).

[0305] In general, by defining the degree of diagnostic accuracy, i.e., cut points on a ROC curve, defining an acceptable AUC value, and determining the acceptable ranges in relative concentration of what constitutes an effective amount of the cancer associated gene(s) of the invention allows for one of skill in the art to use the cancer associated gene(s) to identify, diagnose, or prognose subjects with a pre-determined level of predictability and performance.

[0306] Results from the cancer associated gene(s) indices thus derived can then be validated through their calibration with actual results, that is, by comparing the predicted versus observed rate of disease in a given population, and the best predictive cancer associated gene(s) selected for and optimized through mathematical models of increased complexity. Many such formula may be used; beyond the simple non-linear transformations, such as logistic regression, of particular interest in this use of the present invention are structural and synactic classification algorithms, and methods of risk index construction, utilizing pattern recognition features, including established techniques such as the Kth-Nearest Neighbor, Boosting, Decision Trees, Neural Networks, Bayesian Networks, Support Vector Machines, and Hidden Markov Models, as well as other formula described herein.

[0307] Furthermore, the application of such techniques to panels of multiple cancer associated gene(s) is provided, as is the use of such combination to create single numerical “risk indices” or “risk scores” encompassing information from multiple cancer associated gene(s) inputs. Individual B cancer associated gene(s) may also be included or excluded in the panel of cancer associated gene(s) used in the calculation of the cancer associated gene(s) indices so derived above, based on various measures of relative performance and calibration in validation, and employing through repetitive training methods such as forward, reverse, and stepwise selection, as well as with genetic algorithm approaches, with or without the use of constraints on the complexity of the resulting cancer associated gene(s) indices.

[0308] The above measurements of diagnostic accuracy for cancer associated gene(s) are only a few of the possible measurements of the clinical performance of the invention. It should be noted that the appropriateness of one measurement of clinical accuracy or another will vary based upon the clinical application, the population tested, and the clinical consequences of any potential misclassification of subjects. Other important aspects of the clinical and overall performance of the invention include the selection of cancer associated gene(s) so as to reduce overall cancer associated gene(s) variability (whether due to method (analytical) or biological (pre-analytical variability, for example, as in diurnal variation), or to the integration and analysis of results (post-analytical variability) into indices and cut-off ranges), to assess analyte stability or sample integrity, or to allow the use of differing sample matrices amongst blood, cells, serum, plasma, urine, etc.

### Kits

[0309] The invention also includes a colorectal cancer detection reagent, i.e., nucleic acids that specifically identify one or more colorectal cancer or condition related to colorectal cancer nucleic acids (e.g., any gene listed in Tables 1-5, oncogenes, tumor suppression genes, tumor progression genes, angiogenesis genes and lymphogenesis genes; sometimes referred to herein as colorectal cancer associated genes or colorectal cancer associated constituents) by having homologous nucleic acid sequences, such as oligonucleotide sequences, complementary to a portion of the colorectal cancer genes nucleic acids or antibodies to proteins encoded by the colorectal cancer gene nucleic acids packaged together in the form of a kit. The oligonucleotides can be fragments of the colorectal cancer genes. For example the oligonucleotides can be 200, 150, 100, 50, 25, 10 or less nucleotides in length. The kit may contain in separate containers a nucleic acid or antibody (either already bound to a solid matrix or packaged separately with reagents for binding them to the matrix), control formulations (positive and/or negative), and/or a detectable label. Instructions (i.e., written, tape, VCR, CD-ROM, etc.) for carrying out the assay may be included in the kit. The assay may for example be in the form of PCR, a Northern hybridization or a sandwich ELISA, as known in the art.

[0310] For example, colorectal cancer gene detection reagents can be immobilized on a solid matrix such as a porous strip to form at least one colorectal cancer gene detection site. The measurement or detection region of the porous strip may include a plurality of sites containing a nucleic acid. A test strip may also contain sites for negative and/or positive controls. Alternatively, control sites can be located on a separate strip from the test strip. Optionally, the different detection sites may contain different amounts of immobilized nucleic acids, i.e., a higher amount in the first detection site and lesser amounts in subsequent sites. Upon the addition of test sample, the number of sites displaying a detectable signal provides a quantitative indication of the amount of colorectal cancer genes present in the sample. The detection sites may be configured in any suitably detectable shape and are typically in the shape of a bar or dot spanning the width of a test strip.

[0311] Alternatively, colorectal cancer detection genes can be labeled (e.g., with one or more fluorescent dyes) and immobilized on lyophilized beads to form at least one colorectal cancer gene detection site. The beads may also contain sites for negative and/or positive controls. Upon addition of the test sample, the number of sites displaying a detectable signal provides a quantitative indication of the amount of colorectal cancer genes present in the sample.

[0312] Alternatively, the kit contains a nucleic acid substrate array comprising one or more nucleic acid sequences. The nucleic acids on the array specifically identify one or more nucleic acid sequences represented by colorectal cancer genes (see Tables 1-5). In various embodiments, the expression of 1, 2, 3, 4, 5, 6, 7, 8, 9, 10, 15, 20, 25, 40 or 50 or more of the sequences represented by colorectal cancer genes (see Tables 1-5) can be identified by virtue of binding to the array. The substrate array can be on, i.e., a solid substrate, i.e., a “chip” as described in U.S. Pat. No. 5,744,305. Alternatively, the substrate array can be a solution array, i.e., Luminex, Cyvera, Vitra and Quantum Dots' Mosaic.

[0313] The skilled artisan can routinely make antibodies, nucleic acid probes, i.e., oligonucleotides, aptamers, siRNAs, antisense oligonucleotides, against any of the colorectal cancer genes listed in Tables 1-5.

### Other Embodiments

[0314] While the invention has been described in conjunction with the detailed description thereof, the foregoing description is intended to illustrate and not limit the scope of the invention, which is defined by the scope of the appended claims. Other aspects, advantages, and modifications are within the scope of the following claims.

### EXAMPLES

### Example 1

### Patient Population

[0315] RNA was isolated using the PAXgene System from blood samples obtained from a total of 23 subjects suffering from colon cancer and 50 healthy, normal (i.e., not suffering from or diagnosed with colon cancer) subjects. These RNA samples were used for the gene expression analysis studies described in Examples 3-7 below.

[0316] The inclusion criteria for the colon cancer subjects that participated in the study were as follows: each of the subjects had defined, newly diagnosed disease, the blood samples were obtained prior to initiation of any treatment for colon cancer, and each subject in the study was 18 years or older, and able to provide consent.

[0317] The following criteria were used to exclude subjects from the study: any treatment with immunosuppressive drugs, corticosteroids or investigational drugs; diagnosis of acute and chronic infectious diseases (renal or chest infections, previous TB, HIV infection or AIDS, or active cytomegalovirus); symptoms of severe progression or uncontrolled renal, hepatic, hematological, gastrointestinal, endocrine, pulmonary, neurological, or cerebral disease; and pregnancy.

### Example 2

### Enumeration and Classification Methodology Based on Logistic Regression Models

### Introduction

[0318] The following methods were used to generate 1, 2, and 3-gene models capable of distinguishing between subjects diagnosed with colon cancer and normal subjects, with at least 75% classification accuracy, as described in Examples 3-7 below.

[0319] Given measurements on G genes from samples of N₁ subjects belonging to group 1 and N₂ members of group 2, the purpose was to identify models containing g<G genes which discriminate between the 2 groups. The groups might be such that one consists of reference subjects (e.g., healthy, normal subjects) while the other group might have a specific disease, or subjects in group 1 may have disease A while those in group 2 may have disease B.

[0320] Specifically, parameters from a linear logistic regression model were estimated to predict a subject's probability of belonging to group 1 given his (her) measurements on the g genes in the model. After all the models were estimated (all G 1-gene models were estimated, as well as

$$all ( \begin{matrix}G \\ 2\end{matrix} ) = G * ( G \text{-} 1 ) / 2 \; 2 \text{-} gene models ,$$

and all (G 3)=G*(G−1)*(G−2)/6 3-gene models based on G genes (number of combinations taken 3 at a time from G)), they were evaluated using a 2-dimensional screening process. The first dimension employed a statistical screen (significance of incremental p-values) that eliminated models that were likely to overfit the data and thus may not validate when applied to new subjects. The second dimension employed a clinical screen to eliminate models for which the expected misclassification rate was higher than an acceptable level. As a threshold analysis, the gene models showing less than 75% discrimination between N₁ subjects belonging to group 1 and N₂ members of group 2 (i.e., misclassification of 25% or more of subjects in either of the 2 sample groups), and genes with incremental p-values that were not statistically significant, were eliminated.

### Methodological, Statistical and Computing Tools Used

[0321] The Latent GOLD program (Vermunt and Magidson, 2005) was used to estimate the logistic regression models. For efficiency in processing the models, the LG-Syntax™ Module available with version 4.5 of the program (Vermunt and Magidson, 2007) was used in batch mode, and all g-gene models associated with a particular dataset were submitted in a single run to be estimated. That is, all 1-gene models were submitted in a single run, all 2-gene models were submitted in a second run, etc.

### The Data

[0322] The data consists of ΔC_{T} values for each sample subject in each of the 2 groups (e.g., to cancer subject vs. reference (e.g., healthy, normal subjects) on each of G(k) genes obtained from a particular class k of genes. For a given disease, separate analyses were performed based on disease specific genes, including without limitation genes specific for prostate, breast, ovarian, cervical, lung, colon, and skin cancer, (k=1), inflammatory genes (k=2), human cancer general genes (k=3), genes from a cross cancer gene panel (k=4), and genes in the EGR family (k=5).

### Analysis Steps

[0323] The steps in a given analysis of the G(k) genes measured on N₁ subjects in group 1 and N₂ subjects in group 2 are as follows:
[0324] 1) Eliminate low expressing genes: In some instances, target gene FAM measurements were beyond the detection limit (i.e., very high ΔC_{T} values which indicate low expression) of the particular platform instrument used to detect and quantify constituents of a Gene Expression Panel (Precision Profile™). To address the issue of “undetermined” gene expression measures as lack of expression for a particular gene, the detection limit was reset and the “undetermined” constituents were “flagged”, as previously described. C_{T} normalization (Δ C_{T}) and relative expression calculations that have used re-set FAM C_{T} values were also flagged. In some instances, these low expressing genes (i.e., re-set FAM C_{T} values) were eliminated from the analysis in step 1 if 50% or more ΔC_{T} values from either of the 2 groups were flagged. Although such genes were eliminated from the statistical analyses described herein, one skilled in the art would recognize that such genes may be relevant in a disease state.
[0325] 2) Estimate logistic regression (logit) models predicting P(i)=the probability of being in group 1 for each subject i=1, 2, . . . , N₁+N₂. Since there are only 2 groups, the probability of being in group 2 equals 1−P(i). The maximum likelihood (ML) algorithm implemented in Latent GOLD 4.0 (Vermunt and Magidson, 2005) was used to estimate the model parameters. All 1-gene models were estimated first, followed by all 2-gene models and in cases where the sample sizes N₁ and N₂ were sufficiently large, all 3-gene models were estimated.
[0326] 3) Screen out models that fail to meet the statistical or clinical criteria: Regarding the statistical criteria, models were retained if the incremental p-values for the parameter estimates for each gene (i.e., for each predictor in the model) fell below the cutoff point alpha=0.05. Regarding the clinical criteria, models were retained if the percentage of cases within each group (e.g., disease group, and reference group (e.g., healthy, normal subjects) that was correctly predicted to be in that group was at least 75%. For technical details, see the section “Application of the Statistical and Clinical Criteria to Screen Models”.
[0327] 4) Each model yielded an index that could be used to rank the sample subjects. Such an index value could also be computed for new cases not included in the sample. See the section “Computing Model-based Indices for each Subject” for details on how this index was calculated.
[0328] 5) A cutoff value somewhere between the lowest and highest index value was selected and based on this cutoff, subjects with indices above the cutoff were classified (predicted to be) in the disease group, those below the cutoff were classified into the reference group (i.e., normal, healthy subjects). Based on such classifications, the percent of each group that is correctly classified was determined. See the section labeled “Classifying Subjects into Groups” for details on how the cutoff was chosen.
[0329] 6) Among all models that survived the screening criteria (Step 3), an entropy-based R² statistic was used to rank the models from high to low, i.e., the models with the highest percent classification rate to the lowest percent classification rate. The top 5 such models are then evaluated with respect to the percent correctly classified and the one having the highest percentages was selected as the single “best” model. A discrimination plot was provided for the best model having an 85% or greater percent classification rate. For details on how this plot was developed, see the section “Discrimination Plots” below.

[0330] While there are several possible R² statistics that might be used for this purpose, it was determined that the one based on entropy was most sensitive to the extent to which a model yields clear separation between the 2 groups. Such sensitivity provides a model which can be used as a tool by a practitioner (e.g., primary care physician, oncologist, etc.) to ascertain the necessity of future screening or treatment options. For more detail on this issue, see the section labeled “Using R² Statistics to Rank Models” below.

### Computing Model-Based Indices for Each Subject

[0331] The model parameter estimates were used to compute a numeric value (logit, odds or probability) for each diseased and reference subject (e.g., healthy, normal subject) in the sample. For illustrative purposes only, in an example of a 2-gene logit model for cancer containing the genes ALOX5 and S100A6, the following parameter estimates listed in Table A were obtained:

TABLE A

| | | |
|---|---|---|
| Cancer | alpha(1) | 18.37 |
| Normals | alpha(2) | −18.37 |
| Predictors | | |
| ALOX5 | beta(1) | −4.81 |
| S100A6 | beta(2) | 27.9 |

For a given subject with particular ΔC_{T} values observed for these genes, the predicted logit associated with cancer vs. reference (i.e., normals) was computed as:

LOGIT(ALOX5,S100A6)=[alpha(1)−alpha(2)]+beta(1)*ALOX5+beta(2)*S100A6.

The predicted odds of having cancer would be:

ODDS(ALOX5,S100A6)=exp[LOGIT(ALOX5,S100A6)]

and the predicted probability of belonging to the cancer group is:

P(ALOX5,S100A6)=ODDS(ALOX5,S100A6)/[1+ODDS(ALOX5,S100A6)]

[0332] Note that the ML estimates for the alpha parameters were based on the relative proportion of the group sample sizes. Prior to computing the predicted probabilities, the alpha estimates may be adjusted to take into account the relative proportion in the population to which the model will be applied (for example, without limitation, the incidence of prostate cancer in the population of adult men in the U.S., the incidence of breast cancer in the population of adult women in the U.S., etc.)

Classifying Subjects into Groups

[0333] The “modal classification rule” was used to predict into which group a given case belongs. This rule classifies a case into the group for which the model yields the highest predicted probability. Using the same cancer example previously described (for illustrative purposes only), use of the modal classification rule would classify any subject having P>0.5 into the cancer group, the others into the reference group (e.g., healthy, normal subjects). The percentage of all N₁ cancer subjects that were correctly classified were computed as the number of such subjects having P>0.5 divided by N₁. Similarly, the percentage of all N₂ reference (e.g., normal healthy) subjects that were correctly classified were computed as the number of such subjects having P≦0.5 divided by N₂. Alternatively, a cutoff point P₀ could be used instead of the modal classification rule so that any subject i having P(i)>P₀ is assigned to the cancer group, and otherwise to the Reference group (e.g., normal, healthy group).

### Application of the Statistical and Clinical Criteria to Screen Models

### Clinical Screening Criteria

[0334] In order to determine whether a model met the clinical 75% correct classification criteria, the following approach was used:
[0335] A. All sample subjects were ranked from high to low by their predicted probability P (e.g., see Table B).
[0336] B. Taking P₀(i)=P(i) for each subject, one at a time, the percentage of group 1 and group 2 that would be correctly classified, P₁(i) and P₂(i) was computed.
[0337] C. The information in the resulting table was scanned and any models for which none of the potential cutoff probabilities met the clinical criteria (i.e., no cutoffs P₀(i) exist such that both P₁(i)>0.75 and P₂(i)>0.75) were eliminated. Hence, models that did not meet the clinical criteria were eliminated.

[0338] The example shown in Table B has many cut-offs that meet this criteria. For example, the cutoff P₀=0.4 yields correct classification rates of 92% for the reference group (i.e., normal, healthy subjects), and 93% for Cancer subjects. A plot based on this cutoff is shown in FIG. 1 and described in the section “Discrimination Plots”.

### Statistical Screening Criteria

[0339] In order to determine whether a model met the statistical criteria, the following approach was used to compute the incremental p-value for each gene g=1, 2, . . . , G as follows:
[0340] i. Let LSQ(0) denote the overall model L-squared output by Latent GOLD for an unrestricted model.
[0341] ii. Let LSQ(g) denote the overall model L-squared output by Latent GOLD for the restricted version of the model where the effect of gene g is restricted to 0.
[0342] iii. With 1 degree of freedom, use a ‘components of chi-square’ table to determine the p-value associated with the LR difference statistic LSQ(g)-LSQ(0).
   Note that this approach required estimating g restricted models as well as 1 unrestricted model.

### Discrimination Plots

[0343] For a 2-gene model, a discrimination plot consisted of plotting the ΔC_{T} values for each subject in a scatterplot where the values associated with one of the genes served as the vertical axis, the other serving as the horizontal axis. Two different symbols were used for the points to denote whether the subject belongs to group 1 or 2.

[0344] A line was appended to a discrimination graph to illustrate how well the 2-gene model discriminated between the 2 groups. The slope of the line was determined by computing the ratio of the ML parameter estimate associated with the gene plotted along the horizontal axis divided by the corresponding estimate associated with the gene plotted along the vertical axis. The intercept of the line was determined as a function of the cutoff point. For the cancer example model based on the 2 genes ALOX5 and S100A6 shown in FIG. 1, the equation for the line associated with the cutoff of 0.4 is ALOX5=7.7+0.58*S100A6. This line provides correct classification rates of 93% and 92% (4 of 57 cancer subjects misclassified and only 4 of 50 reference (i.e., normal) subjects misclassified).

[0345] For a 3-gene model, a 2-dimensional slice defined as a linear combination of 2 of the genes was plotted along one of the axes, the remaining gene being plotted along the other axis. The particular linear combination was determined based on the parameter estimates. For example, if a 3^{rd} gene were added to the 2-gene model consisting of ALOX5 and S100A6 and the parameter estimates for ALOX5 and S100A6 were beta(1) and beta(2) respectively, the linear combination beta(1)*ALOX5+beta(2)*S100A6 could be used. This approach can be readily extended to the situation with 4 or more genes in the model by taking additional linear combinations. For example, with 4 genes one might use beta(1)*ALOX5+beta(2)*S100A6-along one axis and beta(3)*gene3+beta(4)*gene4 along the other, or beta(1)*ALOX530 beta(2)*S100A6+beta(3)*gene3 along one axis and gene4 along the other axis. When producing such plots with 3 or more genes, genes with parameter estimates having the same sign were chosen for combination.

### Using R²Statistics to Rank Models

[0346] The R² in traditional OLS (ordinary least squares) linear regression of a continuous dependent variable can be interpreted in several different ways, such as 1) proportion of variance accounted for, 2) the squared correlation between the observed and predicted values, and 3) a transformation of the F-statistic. When the dependent variable is not continuous but categorical (in our models the dependent variable is dichotomous—membership in the diseased group or reference group), this standard R² defined in terms of variance (see definition 1 above) is only one of several possible measures. The term ‘pseudo R²’ has been coined for the generalization of the standard variance-based R² for use with categorical dependent variables, as well as other settings where the usual assumptions that justify OLS do not apply.

[0347] The general definition of the (pseudo) R² for an estimated model is the reduction of errors compared to the errors of a baseline model. For the purpose of the present invention, the estimated model is a logistic regression model for predicting group membership based on 1 or more continuous predictors (ΔC_{T} measurements of different genes). The baseline model is the regression model that contains no predictors; that is, a model where the regression coefficients are restricted to 0. More precisely, the pseudo R² is defined as:

R²=[Error(baseline)−Error(model)]/Error(baseline)

Regardless how error is defined, if prediction is perfect, Error(model)=0 which yields R²=1. Similarly, if all of the regression coefficients do in fact turn out to equal 0, the model is equivalent to the baseline, and thus R²=0. In general, this pseudo R² falls somewhere between 0 and 1.

[0348] When Error is defined in terms of variance, the pseudo R² becomes the standard R². When the dependent variable is dichotomous group membership, scores of 1 and 0, −1 and +1, or any other 2 numbers for the 2 categories yields the same value for R². For example, if the dichotomous dependent variable takes on the scores of 1 and 0, the variance is defined as P*(1−P) where P is the probability of being in 1 group and 1−P the probability of being in the other.

[0349] A common alternative in the case of a dichotomous dependent variable, is to define error in terms of entropy. In this situation, entropy can be defined as P*1n(P)*(1−P)*ln(1−P) (for further discussion of the variance and the entropy based R², see Magidson, Jay, “Qualitative Variance, Entropy and Correlation Ratios for Nominal Dependent Variables,” Social Science Research 10 (June), pp. 177-194).

[0350] The R² statistic was used in the enumeration methods described herein to identify the “best” gene-model. R² can be calculated in different ways depending upon how the error variation and total observed variation are defined. For example, four different R² measures output by Latent GOLD are based on:

a) Standard variance and mean squared error (MSE)
b) Entropy and minus mean log-likelihood (−MLL)
c) Absolute variation and mean absolute error (MAE)
d) Prediction errors and the proportion of errors under modal assignment (PPE)

[0351] Each of these 4 measures equal 0 when the predictors provide zero discrimination between the groups, and equal 1 if the model is able to classify each subject into their actual group with 0 error. For each measure, Latent GOLD defines the total variation as the error of the baseline (intercept-only) model which restricts the effects of all predictors to 0. Then for each, R² is defined as the proportional reduction of errors in the estimated model compared to the baseline model. For the 2-gene cancer example used to illustrate the enumeration methodology described herein, the baseline model classifies all cases as being in the diseased group since this group has a larger sample size, resulting in 50 misclassifications (all 50 normal subjects are misclassified) for a prediction error of 50/107=0.467. In contrast, there are only 10 prediction errors (=10/107=0.093) based on the 2-gene model using the modal assignment rule, thus yielding a prediction error R² of 1−0.093/0.467=0.8. As shown in Exhibit 1, 4 normal and 6 cancer subjects would be misclassified-using the modal assignment rule. Note that the modal rule utilizes P₀=0.5 as the cutoff. If P₀=0.4 were used instead, there would be only 8 misclassified subjects.

[0352] The sample discrimination plot shown in FIG. 1 is for a 2-gene model for cancer based on disease-specific genes. The 2 genes in the model are ALOX5 and S100A6 and only 8 subjects are misclassified (4 blue circles corresponding to normal subjects fall to the right and below the line, while 4 red Xs corresponding to misclassified cancer subjects lie above the line).

[0353] To reduce the likelihood of obtaining models that capitalize on chance variations in the observed samples the models may be limited to contain only M genes as predictors in the model. (Although a model may meet the significance criteria, it may overfit data and thus would not be expected to validate when applied to a new sample of subjects.) For example, for M=2, all models would be estimated which contain:

[0354] A. 1-gene G such models

[0355] B.

$$2 \text{-} gene models \text{-} ( \begin{matrix}G \\ 2\end{matrix} ) = G * ( G \text{-} 1 ) / 2 such models$$

[0356] C. 3-gene models—(G 3)=G*(G−1)*(G−2)/6 such models

### Computation of the Z-Statistic

[0357] The Z-Statistic associated with the test of significance between the mean ΔC_{T} values for the cancer and normal groups for any gene g was calculated as follows:

i. Let LL[g] denote the log of the likelihood function that is maximized under the logistic regression model that predicts group membership (Cancer vs. Normal) as a function of the ΔC_{T} value associated with gene g. There are 2 parameters in this model—an intercept and a slope.
ii. Let LL(0) denote the overall model L-squared output by Latent GOLD for the restricted version of the model where the slope parameter reflecting the effect of gene g is restricted to 0. This model has only 1 unrestricted parameter—the intercept.
iii. With 2-1=1 degree of freedom (the difference in the number of unrestricted parameters in the models), one can use a ‘components of chi-square’ table to determine the p-value associated with the Log Likelihood difference statistic LLDiff=−2*(LL[0]−LL[g])=2*(LL[g]−LL[0]).
iv. Since the chi-squared statistic with 1 df is the square of a Z-statistic, the magnitude of the Z-statistic can be computed as the square root of the LLDiff. The sign of Z is negative if the mean ΔC_{T} value for the cancer group on gene g is less than the corresponding mean for the normal group, and positive if it is greater.
v. These Z-statistics can be plotted as a bar graph. The length of the bar has a monotonic relationship with the p-value.

TABLE B
ΔC_{T} Values and Model Predicted
Probability of Cancer for Each Subject

| ALOX5 | S100A6 | P | Group |
|---|---|---|---|
| 13.92 | 16.13 | 1.0000 | Cancer |
| 13.90 | 15.77 | 1.0000 | Cancer |
| 13.75 | 15.17 | 1.0000 | Cancer |
| 13.62 | 14.51 | 1.0000 | Cancer |
| 15.33 | 17.16 | 1.0000 | Cancer |
| 13.86 | 14.61 | 1.0000 | Cancer |
| 14.14 | 15.09 | 1.0000 | Cancer |
| 13.49 | 13.60 | 0.9999 | Cancer |
| 15.24 | 16.61 | 0.9999 | Cancer |
| 14.03 | 14.45 | 0.9999 | Cancer |
| 14.98 | 16.05 | 0.9999 | Cancer |
| 13.95 | 14.25 | 0.9999 | Cancer |
| 14.09 | 14.13 | 0.9998 | Cancer |
| 15.01 | 15.69 | 0.9997 | Cancer |
| 14.13 | 14.15 | 0.9997 | Cancer |
| 14.37 | 14.43 | 0.9996 | Cancer |
| 14.14 | 13.88 | 0.9994 | Cancer |
| 14.33 | 14.17 | 0.9993 | Cancer |
| 14.97 | 15.06 | 0.9988 | Cancer |
| 14.59 | 14.30 | 0.9984 | Cancer |
| 14.45 | 13.93 | 0.9978 | Cancer |
| 14.40 | 13.77 | 0.9972 | Cancer |
| 14.72 | 14.31 | 0.9971 | Cancer |
| 14.81 | 14.38 | 0.9963 | Cancer |
| 14.54 | 13.91 | 0.9963 | Cancer |
| 14.88 | 14.48 | 0.9962 | Cancer |
| 14.85 | 14.42 | 0.9959 | Cancer |
| 15.40 | 15.30 | 0.9951 | Cancer |
| 15.58 | 15.60 | 0.9951 | Cancer |
| 14.82 | 14.28 | 0.9950 | Cancer |
| 14.78 | 14.06 | 0.9924 | Cancer |
| 14.68 | 13.88 | 0.9922 | Cancer |
| 14.54 | 13.64 | 0.9922 | Cancer |
| 15.86 | 15.91 | 0.9920 | Cancer |
| 15.71 | 15.60 | 0.9908 | Cancer |
| 16.24 | 16.36 | 0.9858 | Cancer |
| 16.09 | 15.94 | 0.9774 | Cancer |
| 15.26 | 14.41 | 0.9705 | Cancer |
| 14.93 | 13.81 | 0.9693 | Cancer |
| 15.44 | 14.67 | 0.9670 | Cancer |
| 15.69 | 15.08 | 0.9663 | Cancer |
| 15.40 | 14.54 | 0.9615 | Cancer |
| 15.80 | 15.21 | 0.9586 | Cancer |
| 15.98 | 15.43 | 0.9485 | Cancer |
| 15.20 | 14.08 | 0.9461 | Normal |
| 15.03 | 13.62 | 0.9196 | Cancer |
| 15.20 | 13.91 | 0.9184 | Cancer |
| 15.04 | 13.54 | 0.8972 | Cancer |
| 15.30 | 13.92 | 0.8774 | Cancer |
| 15.80 | 14.68 | 0.8404 | Cancer |
| 15.61 | 14.23 | 0.7939 | Normal |
| 15.89 | 14.64 | 0.7577 | Normal |
| 15.44 | 13.66 | 0.6445 | Cancer |
| 16.52 | 15.38 | 0.5343 | Cancer |
| 15.54 | 13.67 | 0.5255 | Normal |
| 15.28 | 13.11 | 0.4537 | Cancer |
| 15.96 | 14.23 | 0.4207 | Cancer |
| 15.96 | 14.20 | 0.3928 | Normal |
| 16.25 | 14.69 | 0.3887 | Cancer |
| 16.04 | 14.32 | 0.3874 | Cancer |
| 16.26 | 14.71 | 0.3863 | Normal |
| 15.97 | 14.18 | 0.3710 | Cancer |
| 15.93 | 14.06 | 0.3407 | Normal |
| 16.23 | 14.41 | 0.2378 | Cancer |
| 16.02 | 13.91 | 0.1743 | Normal |
| 15.99 | 13.78 | 0.1501 | Normal |
| 16.74 | 15.05 | 0.1389 | Normal |
| 16.66 | 14.90 | 0.1349 | Normal |
| 16.91 | 15.20 | 0.0994 | Normal |
| 16.47 | 14.31 | 0.0721 | Normal |
| 16.63 | 14.57 | 0.0672 | Normal |
| 16.25 | 13.90 | 0.0663 | Normal |
| 16.82 | 14.84 | 0.0596 | Normal |
| 16.75 | 14.73 | 0.0587 | Normal |
| 16.69 | 14.54 | 0.0474 | Normal |
| 17.13 | 15.25 | 0.0416 | Normal |
| 16.87 | 14.72 | 0.0329 | Normal |
| 16.35 | 13.76 | 0.0285 | Normal |
| 16.41 | 13.83 | 0.0255 | Normal |
| 16.68 | 14.20 | 0.0205 | Normal |
| 16.58 | 13.97 | 0.0169 | Normal |
| 16.66 | 14.09 | 0.0167 | Normal |
| 16.92 | 14.49 | 0.0140 | Normal |
| 16.93 | 14.51 | 0.0139 | Normal |
| 17.27 | 15.04 | 0.0123 | Normal |
| 16.45 | 13.60 | 0.0116 | Normal |
| 17.52 | 15.44 | 0.0110 | Normal |
| 17.12 | 14.46 | 0.0051 | Normal |
| 17.13 | 14.46 | 0.0048 | Normal |
| 16.78 | 13.86 | 0.0047 | Normal |
| 17.10 | 14.36 | 0.0041 | Normal |
| 16.75 | 13.69 | 0.0034 | Normal |
| 17.27 | 14.49 | 0.0027 | Normal |
| 17.07 | 14.08 | 0.0022 | Normal |
| 17.16 | 14.08 | 0.0014 | Normal |
| 17.50 | 14.41 | 0.0007 | Normal |
| 17.50 | 14.18 | 0.0004 | Normal |
| 17.45 | 14.02 | 0.0003 | Normal |
| 17.53 | 13.90 | 0.0001 | Normal |
| 18.21 | 15.06 | 0.0001 | Normal |
| 17.99 | 14.63 | 0.0001 | Normal |
| 17.73 | 14.05 | 0.0001 | Normal |
| 17.97 | 14.40 | 0.0001 | Normal |
| 17.98 | 14.35 | 0.0001 | Normal |
| 18.47 | 15.16 | 0.0001 | Normal |
| 18.28 | 14.59 | 0.0000 | Normal |
| 18.37 | 14.71 | 0.0000 | Normal |

### Example 3

### Precision Profile™ for Colorectal Cancer

[0358] Custom primers and probes were prepared for the targeted 70 genes shown in the Precision Profile™ for Colorectal Cancer (shown in Table 1), selected to be informative relative to biological state of colon cancer patients. Gene expression profiles for the 70 colon cancer specific genes were analyzed using the 19 of the RNA samples obtained from colon cancer subjects, and the 50 RNA samples obtained from healthy, normal subjects, as described in Example 1.

[0359] Logistic regression models yielding the best discrimination between subjects diagnosed with colon cancer and normal subjects were generated using the enumeration and classification methodology described in Example 2. A listing of all 1 and 2-gene logistic regression models capable of distinguishing between subjects diagnosed with colon cancer and normal subjects with at least 75% accuracy is shown in Table 1A, (read from left to right).

[0360] As shown in Table 1A, the 1 and 2-gene models are identified in the first two columns on the left side of Table 1A, ranked by their entropy R² value (shown in column 3, ranked from high to low). The number of subjects correctly classified or misclassified by each 1 or 2-gene model for each patient group (i.e., normal vs. colon cancer) is shown in columns 4-7. The percent normal subjects and percent colon cancer subjects correctly classified by the corresponding gene model is shown in columns 8 and 9. The incremental p-value for each first and second gene in the 1 or 2-gene model is shown in columns 10 and 11 (note p-values smaller than 1×10⁻¹⁷ are 20, reported as ‘0 ’). The total number of RNA samples analyzed in each patient group (i.e., normals vs. colon cancer), after exclusion of missing values, is shown in columns 12 and 13. The values missing from the total sample number for normal and/or colon cancer subjects shown in columns 12 and 13 correspond to instances in which values were excluded from the logistic regression analysis due to reagent limitations and/or instances where replicates did not meet quality metrics.

[0361] For example, the “best” logistic regression model (defined as the model with the highest entropy R² value, as described in Example 2) based on the 70 genes included in the Precision Profile™ for Colorectal Cancer is shown in the first row of Table 1A, read left to right. The first row of Table 1A lists a 2-gene model, MSH6 and PSEN2, capable of classifying normal subjects with 87.5% accuracy, and colon cancer subjects with 84.2% accuracy. A total number of 48 normal and 19 colon cancer RNA samples were analyzed for this 2-gene model, after exclusion of missing values. As shown in Table 1A, this 2-gene model correctly classifies 42 of the normal subjects as being in the normal patient population, and misclassifies 6 of the normal subjects as being in the colon cancer patient population. This 2-gene model correctly classifies 16 of the colon cancer subjects as being in the colon cancer patient population, and misclassifies 3 of the colon cancer subjects as being in the normal patient population. The p-value for the 1^{st} gene, MSH6 is 6.6E-11, the incremental p-value for the second gene, PSEN2, is 1.2E-06.

[0362] A discrimination plot of the 2-gene model, MSH6 and PSEN2, is shown in FIG. 2. As shown in FIG. 2, the normal subjects are represented by circles, whereas the colon cancer subjects are represented by X's. The line appended to the discrimination graph in FIG. 2 illustrates how well the 2-gene model discriminates between the 2 groups. Values below and to the right of the line represent subjects predicted by the 2-gene model to be in the normal population. Values above and to the left of the line represent subjects predicted to be in the colon cancer population. As shown in FIG. 2, 5 normal subjects (circles) and 3 colon cancer subjects (X's) are classified in the wrong patient population.

[0363] The following equation describes the discrimination line shown in FIG. 2:

MSH6=2.861677+0.840724*PSEN2

[0364] The intercept (alpha) and slope (beta) of the discrimination line was computed as follows. A cutoff of 0.286 was used to compute alpha (equals −0.91489 in logit units).

[0365] Subjects above and to the left of this discrimination line have a predicted probability of being in the diseased group higher than the cutoff probability of 0.286.

[0366] The intercept C₀=2.81677 was computed by taking the difference between the intercepts for the 2 groups [−10.544−(10.544)=−21.088] and subtracting the log-odds of the cutoff probability (−0.91489). This quantity was then multiplied by −1/X where X is the coefficient for MSH6 (7.0494).

[0367] A ranking of the top 49 colon cancer specific genes for which gene expression profiles were obtained, from most to least significant, is shown in Table 1B. Table 1B summarizes the results of significance tests (Z-statistic and p-values) for the difference in the mean expression levels for normal subjects and subjects suffering from colon cancer. A negative Z-statistic means that the ΔC_{T} for the colon cancer subjects is less than that of the normals, i.e., genes having a negative Z-statistic are up-regulated in colon cancer subjects as compared to normal subjects. A positive Z-statistic means that the ΔC_{T} for the colon cancer subjects is higher than that of the normals, i.e., genes with a positive Z-statistic are down-regulated in colon cancer subjects as compared to normal subjects. FIG. 3 shows a graphical representation of the Z-statistic for each of the 49 genes shown in Table 1B, indicating which genes are up-regulated and down-regulated in colon cancer subjects as compared to normal subjects.

[0368] The expression values (ΔC_{T}) for the 2-gene model, MSH6 and PSEN2, for each of the 19 colon cancer samples and 48 normal subject samples used in the analysis, and their predicted probability of having colon cancer, is shown in Table 1C. As shown in Table 1C, the predicted probability of a subject having colon cancer, based on the 2-gene model, MSH6 and PSEN2, is based on a scale of 0 to 1, “0” indicating no colon cancer (i.e., normal healthy subject), “1” indicating the subject has colon cancer. A graphical representation of the predicted probabilities of a subject having colon cancer (i.e., a colon cancer index), based on this 2-gene model, is shown in FIG. 4. Such an index can be used as a tool by a practitioner (e.g., primary care physician, oncologist, etc.) for diagnosis of colon cancer and to ascertain the necessity of future screening or treatment options.

### Example 4

### Precision Profile™ for Inflammatory Response

[0369] Custom primers and probes were prepared for the targeted 72 genes shown in the Precision Profile™ for Inflammatory Response (shown in Table 2), selected to be informative relative to biological state of inflammation and cancer. Gene expression profiles for the 72 inflammatory response genes were analyzed using 18 of the RNA samples obtained from colon cancer subjects, and 32 of the RNA samples obtained from healthy, normal subjects, as described in Example 1.

[0370] Logistic regression models yielding the best discrimination between subjects diagnosed with colon cancer and normal subjects were generated using the enumeration and classification methodology described in Example 2. A listing of all 1 and 2-gene logistic regression models capable of distinguishing between subjects diagnosed with colon cancer and normal subjects with at least 75% accuracy is shown in Table 2A, (read from left to right).

[0371] As shown in Table 2A, the 1 and 2-gene models are identified in the first two columns on the left side of Table 2A, ranked by their entropy R² value (shown in column 3, ranked from high to low). The number of subjects correctly classified or misclassified by each 1 or 2-gene model for each patient group (i.e., normal vs. colon cancer) is shown in columns 4-7. The percent normal subjects and percent colon cancer subjects correctly classified by the corresponding gene model is shown in columns 8 and 9. The incremental p-value for each first and second gene in the 1 or 2-gene model is shown in columns 10 and 11 (note p-values smaller than 1×10⁻¹⁷ are reported as ‘0 ’). The total number of RNA samples analyzed in each patient group (i.e., normals vs. colon cancer) after exclusion of missing values, is shown in columns 12-13. The values missing from the total sample number for normal and/or colon cancer subjects shown in columns 12-13 correspond to instances in which values were excluded from the logistic regression analysis due to reagent limitations and/or instances where replicates did not meet quality metrics.

[0372] For example, the “best” logistic regression model (defined as the model with the highest entropy R² value, as described in Example 2) based on the 72 genes included in the Precision Profile™ for Inflammatory Response is shown in the first row of Table 2A, read left to right. The first row of Table 2A lists a 2-gene model, HMOX1 and TXNRD1, capable of classifying normal subjects with 918% accuracy, and colon cancer subjects with 94.4% accuracy. All 32 normal and 18 colon cancer RNA samples were analyzed for this 2-gene model, no values were excluded. As shown in Table 2A, this 2-gene model correctly classifies 30 of the normal subjects as being in the normal patient population, and misclassifies 2 of the normal subjects as being in the colon cancer patient population. This 2-gene model correctly classifies 17 of the colon cancer subjects as being in the colon cancer patient population, and misclassifies 1 of the colon cancer subjects as being in the normal patient population. The p-value for the 1^{st} gene, HMOX1, is 2.3E-09, the incremental p-value for the second gene, TXNRD1 is 2.1E-08.

[0373] A discrimination plot of the 2-gene model, HMOX1 and TXNRD1, is shown in FIG. 5. As shown in FIG. 5, the normal subjects are represented by circles, whereas the colon cancer subjects are represented by X's. The line appended to the discrimination graph in FIG. 5 illustrates how well the 2-gene model discriminates between the 2 groups. Values to the left of the line represent subjects predicted by the 2-gene model to be in the normal population. Values to the right of the line represent subjects predicted to be in the colon cancer population. As shown in FIG. 5, 2 normal subjects (circles) and 1 colon cancer subject (X's) are classified in the wrong patient population.

[0374] The following equation describes the discrimination line shown in FIG. 5:

HMOX1=−2.9520+1.1294*TXNRD1

[0375] The intercept (alpha) and slope (beta) of the discrimination line was computed as follows. A cutoff of 0.41465 was used to compute alpha (equals −0.34478 in logit units).

[0376] Subjects to the right of this discrimination line have a predicted probability of being in the diseased group higher than the cutoff probability of 0.41465.

[0377] The intercept C₀=−2.9520 was computed by taking the difference between the intercepts for the 2 groups [−9.5916-(9.5916)=−19.1832] and subtracting the log-odds of the cutoff probability (−0.34478). This quantity was then multiplied by −1/X where X is the coefficient for HMOX1 (−6.3815).

[0378] A ranking of the top 68 inflammatory response genes for which gene expression profiles were obtained, from most to least significant, is shown in Table 2B. Table 2B summarizes the results of significance tests (p-values) for the difference in the mean expression levels for normal subjects and subjects suffering from colon cancer.

[0379] The expression values (ΔC_{T}) for the 2-gene model, HMOX1 and TXNRD1, for each of the 18 colon cancer subjects and 32 normal subject samples used in the analysis, and their predicted probability of having colon cancer is shown in Table 2C. In Table 2C, the predicted probability of a subject having colon cancer, based on the 2-gene model HMOX1 and TXNRD1, is based on a scale of 0 to 1, “0” indicating no colon cancer (i.e., normal healthy subject), “1” indicating the subject has colon cancer. This predicted probability can be used to create a colon cancer index based on the 2-gene model HMOX1 and TXNRD1, that can be used as a tool by a practitioner (e.g., primary care physician, oncologist, etc.) for diagnosis of colon cancer and to ascertain the necessity of future screening or treatment options.

### Example 5

### Human Cancer General Precision Profile™

[0380] Custom primers and probes were prepared for the targeted 91 genes shown in the Human Cancer Precision Profile™ (shown in Table 3), selected to be informative relative to the biological condition of human cancer, including but not limited to ovarian, breast, cervical, prostate, lung, colon, and skin cancer. Gene expression profiles for these 91 genes were analyzed using 23 of the RNA samples obtained from colon cancer subjects, and the 50 RNA samples obtained from the healthy, normal subjects, as described in Example 1.

[0381] Logistic regression models yielding the best discrimination between subjects diagnosed with colon cancer and normal subjects were generated using the enumeration and classification methodology described in Example 2. A listing of all 1 and 2-gene logistic regression models capable of distinguishing between subjects diagnosed with colon cancer and normal subjects with at least 75% accuracy is shown in Table 3A, (read from left to right).

[0382] As shown in Table 3A, the 1 and 2-gene models are identified in the first two columns on the left side of Table 3A, ranked by their entropy R² value (shown in column 3, ranked from high to low). The number of subjects correctly classified or misclassified by each 1 or 2-gene model for each patient group (i.e., normal vs. colon cancer) is shown in columns 4-7. The percent normal subjects and percent colon cancer subjects correctly classified by the corresponding gene model is shown in columns 8 and 9. The incremental p-value for each first and second gene in the 1 or 2-gene model is shown in columns 10-11 (note p-values smaller than 1×10⁻¹⁷ are reported as ‘0 ’). The total number of RNA samples analyzed in each patient group (i.e., normals vs. colon cancer) after exclusion of missing values, is shown in columns 12 and 13. The values missing from the total sample number for normal and/or colon cancer subjects shown in columns 12-13 correspond to instances in which values were excluded from the logistic regression analysis due to reagent limitations and/or instances where replicates did not meet quality metrics.

[0383] For example, the “best” logistic regression model (defined as the model with the highest entropy R² value, as described in Example 2) based on the 91 genes included in the Human Cancer General Precision Profile™ is shown in the first row of Table 3A, read left to right. The first row of Table 3A lists a 2-gene model, ATM and CDKN2A, capable of classifying normal subjects with 88% accuracy, and colon cancer subjects with 91.3% accuracy. All 50 normal and 23 colon cancer RNA samples were analyzed for this 2-gene model, no values were excluded. As shown in Table 3A, this 2-gene model correctly classifies 44 of the normal subjects as being in the normal patient population, and misclassifies 6 of the normal subjects as being in the colon cancer patient population. This 2-gene model correctly classifies 21 of the colon cancer subjects as being in the colon cancer patient population, and misclassifies 2 of the colon cancer subjects as being in the normal patient population. The p-value for the 1^{st} gene, ATM, is 4.2E-07, the incremental p-value for the second gene, CDKN2A is 2.8E-08.

[0384] A discrimination plot of the 2-gene model, ATM and CDKN2A, is shown in FIG. 6. As shown in FIG. 6, the normal subjects are represented by circles, whereas the colon cancer subjects are represented by X's. The line appended to the discrimination graph in FIG. 6 illustrates how well the 2-gene model discriminates between the 2 groups. Values below and to the right of the line represent subjects predicted by the 2-gene model to be in the normal population. Values above and to the left of the line represent subjects predicted to be in the colon cancer population. As shown in FIG. 6, 6 normal subjects (circles) and 2 colon cancer subjects (X's) are classified in the wrong patient population.

[0385] The following equation describes the discrimination line shown in FIG. 6:

ATM=1.992988+0.71347*CDKN2A

[0386] The intercept (alpha) and slope (beta) of the discrimination line was computed as follows. A cutoff of 0.2123 was used to compute alpha (equals −1.31112 in logit units).

[0387] Subjects above and to the left of this discrimination line have a predicted probability of being in the diseased group higher than the cutoff probability of 0.2123.

[0388] The intercept C₀=1.992988 was computed by taking the difference between the intercepts for the 2 groups [−5.3332-(5.3332)=−10.6664] and subtracting the log-odds of the cutoff probability (−1.31112). This quantity was then multiplied by −1/X where X is the coefficient for ATM (4.6941).

[0389] A ranking of the top 79 genes for which gene expression profiles were obtained, from most to least significant is shown in Table 3B. Table 3B summarizes the results of significance tests (p-values) for the difference in the mean expression levels for normal subjects and subjects suffering from colon cancer.

[0390] The expression values (ΔC_{T}) for the 2-gene model, ATM and CDKN2A, for each of the 23 colon cancer subjects and 50 normal subject samples used in the analysis, and their predicted probability of having colon cancer is shown in Table 3C. In Table 3C, the predicted probability of a subject having colon cancer, based on the 2-gene model ATM and CDKN2A is based on a scale of 0 to 1, “0” indicating no colon cancer (i.e., normal healthy subject), “1” indicating the subject has colon cancer. This predicted probability can be used to create a colon cancer index based on the 2-gene model ATM and CDKN2A, that can be used as a tool by a practitioner (e.g., primary care physician, oncologist, etc.) for diagnosis of colon cancer and to ascertain the necessity of future screening or treatment options.

### Example 6

### EGR1Precision Profile™

[0391] Custom primers and probes were prepared for the targeted 39 genes shown in the Precision Profile™ for EGR1 (shown in Table 4), selected to be informative of the biological role early growth response genes play in human cancer (including but not limited to ovarian, breast, cervical, prostate, lung, colon, and skin cancer). Gene expression profiles for these 39 genes were analyzed using 22 of the RNA samples obtained from colon cancer subjects, and the 50 RNA samples obtained from normal subjects, as described in Example 1.

[0392] Logistic regression models yielding the best discrimination between subjects diagnosed with colon cancer and normal subjects were generated using the enumeration and classification methodology described in Example 2. A listing of all 2-gene logistic regression models capable of distinguishing between subjects diagnosed with colon cancer and normal subjects with at least 75% accuracy is shown in Table 4A, (read from left to right).

[0393] As shown in Table 4A, the 2-gene models are identified in the first two columns on the left side of Table 4A, ranked by their entropy R² value (shown in column 3, ranked from high to low). The number of subjects correctly classified or misclassified by each 2-gene model for each patient group (i.e., normal vs. colon cancer) is shown in columns 4-7. The percent normal subjects and percent colon cancer subjects correctly classified by the corresponding gene model is shown in columns 8 and 9. The incremental p-value for each first and second gene in the 2-gene model is shown in columns 10-11 (note p-values smaller than 1×10⁻¹⁷ are reported as ‘0 ’). The total number of RNA samples analyzed in each patient group (i.e., normals vs. colon cancer) after exclusion of missing values, is shown in columns 12 and 13. The values missing from the total sample number for normal and/or colon cancer subjects shown in columns 12-13 correspond to instances in which values were excluded from the logistic regression analysis due to reagent limitations and/or instances where replicates did not meet quality metrics.

[0394] For example, the “best” logistic regression model (defined as the model with the highest entropy R² value, as described in Example 2) based on the 39 genes included in the Precision Profile™ for EGR1 is shown in the first row of Table 4A, read left to right. The first row of Table 4A lists a 2-gene model, NAB2 and TGFB1, capable of classifying normal subjects with 82% accuracy, and colon cancer subjects with 81.8% accuracy. All 50 normal and 22 colon cancer RNA samples were analyzed for this 2-gene model, no values were excluded. As shown in Table 4A, this 2-gene model correctly classifies 41 of the normal subjects as being in the normal patient population, and misclassifies 9 of the normal subjects as being in the colon cancer patient population. This 2-gene model correctly classifies 18 of the colon cancer subjects as being in the colon cancer patient population, and misclassifies 4 of the colon cancer subjects as being in the normal patient population. The p-value for the 1^{st} gene, NAB2, is 6.4E-09, the incremental p-value for the second gene, TGFB1 is 4.6E-07.

[0395] A ranking of the top 33 genes for which gene expression profiles were obtained, from most to least significant is shown in Table 4B. Table 4B summarizes the results of significance tests (p-values) for the difference in the mean expression levels for normal subjects and subjects suffering from colon cancer.

### Example 7

### Cross-Cancer Precision Profile™

[0396] Custom primers and probes were prepared for the targeted 110 genes shown in the Cross Cancer Precision Profile™ (shown in Table 5), selected to be informative relative to the biological condition of human cancer, including but not limited to ovarian, breast, cervical, prostate, lung, colon, and skin cancer. Gene expression profiles for these 110 genes were analyzed using 23 of the RNA samples obtained from colon cancer subjects, and the 50 RNA samples obtained from healthy, normal subjects, as described in Example 1.

[0397] Logistic regression models yielding the best discrimination between subjects diagnosed with colon cancer and normal subjects were generated using the enumeration and classification methodology described in Example 2. A listing of all 1 and 2-gene logistic regression models capable of distinguishing between subjects diagnosed with colon cancer and normal subjects with at least 75% accuracy is shown in Table 5A, (read from left to right).

[0398] As shown in Table 5A, the 1 and 2-gene models are identified in the first two columns on the left side of Table 5A, ranked by their entropy R² value (shown in column 3, ranked from high to low). The number of subjects correctly classified or misclassified by each 1 or 2-gene model for each patient group (i.e., normal vs. colon cancer) is shown in columns 4-7. The percent normal subjects and percent colon cancer subjects correctly classified by the corresponding gene model is shown in columns 8 and 9. The incremental p-value for each first and second gene in the 1 or 2-gene model is shown in columns 10-11 (note p-values smaller than 1×10⁻¹⁷ are reported as ‘0 ’). The total number of RNA samples analyzed in each patient group (i.e., normals vs. colon cancer) after exclusion of missing values, is shown in columns 12 and 13. The values missing from the total sample number for normal and/or colon cancer subjects shown in columns 12-13 correspond to instances in which values were excluded from the logistic regression analysis due to reagent limitations and/or instances where replicates did not meet quality metrics.

[0399] For example, the “best” logistic regression model (defined as the model with the highest entropy R² value, as described in Example 2) based on the 110 genes in the Human Cancer General Precision Profile™ is shown in the first row of Table 5A, read left to right. The first row of Table 5A lists a 2-gene model, AXIN2 and TNF, capable of classifying normal subjects with 93.9% accuracy, and colon cancer subjects with 90:5% accuracy. Forty-nine of the normal RNA samples and 21 of the colon cancer RNA samples were used to analyze this 2-gene model after exclusion of missing values. As shown in Table 5A, this 2-gene model correctly classifies 46 of the normal subjects as being in the normal patient population and misclassifies 3 of the normal subjects as being in the colon cancer population. This 2-gene model correctly classifies 19 of the colon cancer subjects as being in the colon cancer patient population, and misclassifies only 2 of the colon cancer subjects as being in the normal patient population. The p-value for the 1^{st} gene, AXIN2, is 9.0E-10, the incremental p-value for the second gene, TNF is 2.4E-05.

[0400] A discrimination plot of the 2-gene model, AXIN2 and TNF, is shown in FIG. 7. As shown in FIG. 7, the normal subjects are represented by circles, whereas the colon cancer subjects are represented by X's. The line appended to the discrimination graph in FIG. 7 illustrates how well the 2-gene model discriminates between the 2 groups. Values below and to the right of the line represent subjects predicted by the 2-gene model to be in the normal population. Values above and to the left of the line represent subjects predicted to be in the colon cancer population. As shown in FIG. 7, 3 normal subjects (circles) and only 2 colon cancer subjects (X's) are classified in the wrong patient population.

[0401] The following equation describes the discrimination line shown in FIG. 7:

AXIN2=4.9912+0.79925*TNF

[0402] The intercept (alpha) and slope (beta) of the discrimination line was computed as follows. A cutoff of 0.3966 was used to compute alpha (equals −0.41965 in logit units).

[0403] Subjects above and to the left of this discrimination line have a predicted probability of being in the diseased group higher than the cutoff probability of 0.3966.

[0404] The intercept C₀=4.9912 was computed by taking the difference between the intercepts for the 2 groups [−11.6595−(11.6595)=−23.319] and subtracting the log-odds of the cutoff probability (−0.41965). This quantity was then multiplied by −1/X where X is the coefficient for AXIN2 (4.5879).

[0405] A ranking of the top 107 genes for which gene expression profiles were obtained, from most to least significant is shown in Table 5B. Table 5B summarizes the results of significance tests (p-values) for the difference in the mean expression levels for normal subjects and subjects suffering from colon cancer.

[0406] The expression values (ΔC_{T}) for the 2-gene model, AXIN2 and TNF, for each of the 21 colon cancer subjects and 49 normal subject samples used in the analysis, and their predicted probability of having colon cancer is shown in Table 5C. In Table 5C, the predicted probability of a subject having colon cancer, based on the 2-gene model AXIN2 and TNF is based on a scale of 0 to 1, “0” indicating no colon cancer (i.e., normal healthy subject), “1” indicating the subject to has colon cancer. This predicted probability can be used to create a colon cancer index based on the 2-gene model AXIN2 and TNF, that can be used as a tool by a practitioner (e.g., primary care physician, oncologist, etc.) for diagnosis of colon cancer and to ascertain the necessity of future screening or treatment options.

[0407] These data support that Gene Expression Profiles with sufficient precision and calibration as described herein (1) can determine subsets of individuals with a known biological condition, particularly individuals with colorectal cancer or individuals with conditions related to colorectal cancer; (2) may be used to monitor the response of patients to therapy; (3) may be used to assess the efficacy and safety of therapy; and (4) may be used to guide the medical management of a patient by adjusting therapy to bring one or more relevant Gene Expression Profiles closer to a target set of values, which may be normative values or other desired or achievable values.

[0408] Gene Expression Profiles are used for characterization and monitoring of treatment efficacy of individuals with colorectal cancer, or individuals with conditions related to colorectal cancer. Use of the algorithmic and statistical approaches discussed above to achieve such identification and to discriminate in such fashion is within the scope of various embodiments herein.

[0409] The references listed below are hereby incorporated herein by reference.

### REFERENCES

[0410] Magidson, J. GOLDMineR User's Guide (1998). Belmont, Mass.: Statistical Innovations Inc.
[0411] Vermunt and Magidson (2005). Latent GOLD 4.0 Technical Guide, Belmont Mass.: Statistical Innovations.
[0412] Vermunt and Magidson (2007). LG-Syntax™ User's Guide: Manual for Latent GOLD® 4.5 Syntax Module, Belmont Mass.: Statistical Innovations.
[0413] Vermunt J. K. and J. Magidson. Latent Class Cluster Analysis in (2002) J. A. Hagenaars and A. L. McCutcheon (eds.), Applied Latent Class Analysis, 89-106. Cambridge: Cambridge University Press.
[0414] Magidson, J. “Maximum Likelihood Assessment of Clinical Trials Based on an Ordered Categorical Response.” (1996) Drug Information Journal, Maple Glen, Pa.: Drug Information Association, Vol. 30, No. 1, pp 143-170.

TABLE 1
Precision Profile ™ for Colorectal Cancer

| Gene | | Gene Accession |
|---|---|---|
| Symbol | Gene Name | Number |
| ACSL5 | acyl-CoA synthetase long-chain family member 5 | NM_016234 |
| ACSS2 | acyl-CoA synthetase short-chain family member 2 | NM_018677 |
| | | NM_139274 |
| AFAP | actin filament associated protein | NM_021638 |
| ALDH1A1 | aldehyde dehydrogenase 1 family, member A1 | NM_000689 |
| ALX4 | aristaless-like homeobox 4 | NM_021926 |
| APC | adenomatosis polyposis coli | NM_000038 |
| AXIN2 | axin 2 (conductin, axil) | NM_004655 |
| BAX | BCL2-associated X protein | NM_138761 |
| BCL2 | B-cell CLL/lymphoma 2 | NM_000633 |
| BRAF | v-raf murine sarcoma viral oncogene homolog B1 | NM_004333 |
| CA2 | carbonic anhydrase II | NM_000067 |
| CA4 | carbonic anhydrase IV | NM_000717 |
| CA7 | carbonic anhydrase VII | NM_005182 |
| CCND3 | cyclin D3 | NM_001760 |
| CD44 | CD44 antigen (homing function and Indian blood group system) | NM_000610 |
| CD63 | CD63 antigen (melanoma 1 antigen) | NM_001780 |
| CDC2 | cell division cycle 2, G1 to S and G2 to M | NM_001786 |
| CDX2 | caudal type homeo box transcription factor 2 | NM_001265 |
| CFD | D component of complement (adipsin) | NM_001928 |
| CFLAR | CASP8 and FADD-like apoptosis regulator | NM_003879 |
| CLDN1 | claudin 1 | NM_021101 |
| CXCL1 | chemokine (C—X—C motif) ligand 1 (melanoma growth stimulating activity, | NM_001511 |
| | alpha) | |
| DEFA6 | defensin, alpha 6, Paneth cell-specific | NM_001926 |
| ERBB2 | V-erb-b2 erythroblastic leukemia viral oncogene homolog 2, | NM_004448 |
| | neuro/glioblastoma derived oncogene homolog (avian) | |
| ERBB3 | V-erb-b2 Erythroblastic Leukemia Viral Oncogene Homolog 3 | NM_001982 |
| GADD45A | growth arrest and DNA-damage-inducible, alpha | NM_001924 |
| GPX2 | glutathione peroxidase 2 (gastrointestinal) | NM_002083 |
| GSK3B | glycogen synthase kinase 3 beta | NM_002093 |
| GSTA2 | glutathione S-transferase A2 | NM_000846 |
| GSTT2 | glutathione S-transferase theta 2 | NM_000854 |
| IGF2 | Putative insulin-like growth factor II associated protein. | NM_000612 |
| IGFBP4 | insulin-like growth factor binding protein 4 | NM_001552 |
| IL8 | interleukin 8 | NM_000584 |
| ITGA3 | integrin, alpha 3 (antigen CD49C, alpha 3 subunit of VLA-3 receptor) | NM_005501 |
| KRT19 | keratin 19 | NM_002276 |
| KRT20 | keratin 20 | NM_019010 |
| MGMT | O-6-methylguanine-DNA methyltransferase | NM_002412 |
| MKI67 | antigen identified by monoclonal antibody Ki-67 | NM_002417 |
| MLH1 | mutL homolog 1, colon cancer, nonpolyposis type 2 (E. coli) | NM_000249 |
| MME | membrane metallo-endopeptidase (neutral endopeptidase, enkephalinase, | NM_000902 |
| | CALLA, CD10) | |
| MSH2 | mutS homolog 2, colon cancer, nonpolyposis type 1 (E. coli) | NM_000251 |
| MSH6 | mutS homolog 6 (E. coli) | NM_000179 |
| MUTYH | mutY homolog (E. coli) | NM_012222 |
| MYC | v-myc myelocytomatosis viral oncogene homolog (avian) | NM_002467 |
| NFKB1 | nuclear factor of kappa light polypeptide gene enhancer in B-cells 1 (p105) | NM_003998 |
| NME1 | non-metastatic cells 1, protein (NM23A) expressed in | NM_198175 |
| NR2E1 | nuclear receptor subfamily 2, group E, member 1 | NM_003269 |
| NUAK1 | NUAK family, SNF1-like kinase, 1 | NM_014840 |
| PKLR | pyruvate kinase, liver and RBC | NM_000298 |
| PPARG | peroxisome proliferative activated receptor, gamma | NM_138712 |
| PSEN2 | presenilin 2 (Alzheimer disease 4) | NM_000447 |
| PTGS2 | prostaglandin-endoperoxide synthase 2 (prostaglandin G/H synthase and | NM_000963 |
| | cyclooxygenase) | |
| RGC32 | response gene to complement 32 | NM_014059 |
| RPS3A | ribosomal protein S3A | NM_001006 |
| S100A4 | S100 calcium binding protein A4 | NM_002961 |
| S100P | S100 calcium binding protein P | NM_005980 |
| SAA1 | serum amyloid A1 | NM_199161 |
| SERPINB5 | serpin peptidase inhibitor, clade B (ovalbumin), member 5 | NM_002639 |
| SLC25A21 | solute carrier family 25 (mitochondrial oxodicarboxylate carrier), member | NM_002539 |
| | 21 | |
| SLURP1 | secreted LY6/PLAUR domain containing 1 | NM_020427 |
| SMARCA1 | SWI/SNF related, matrix associated, actin dependent regulator of | NM_139035 |
| | chromatin, subfamily a, member 1 | |
| TCF4 | transcription factor 4 | NM_003199 |
| TGFBR1 | transforming growth factor, beta receptor I (activin A receptor type II-like | NM_004612 |
| | kinase, 53 kDa) | |
| THY1 | Thy-1 cell surface antigen | NM_006288 |
| TNF | tumor necrosis factor (TNF superfamily, member 2) | NM_000594 |
| TP53 | tumor protein p53 (Li-Fraumeni syndrome) | NM_000546 |
| VEGF | vascular endothelial growth factor | NM_003376 |
| VIL1 | villin 1 | NM_007127 |
| ZNF350 | zinc finger protein 350 | NM_021632 |
| ZYX | Zyxin | NM_003461 |

TABLE 2
Precision Profile ™ for Inflammatory Response

| Gene | | Gene Accession |
|---|---|---|
| Symbol | Gene Name | Number |
| ADAM17 | a disintegrin and metalloproteinase domain 17 (tumor necrosis factor, | NM_003183 |
| | alpha, converting enzyme) | |
| ALOX5 | arachidonate 5-lipoxygenase | NM_000698 |
| APAF1 | apoptotic Protease Activating Factor 1 | NM_013229 |
| C1QA | complement component 1, q subcomponent, alpha polypeptide | NM_015991 |
| CASP1 | caspase 1, apoptosis-related cysteine peptidase (interleukin 1, beta, | NM_033292 |
| | convertase) | |
| CASP3 | caspase 3, apoptosis-related cysteine peptidase | NM_004346 |
| CCL3 | chemokine (C-C motif) ligand 3 | NM_002983 |
| CCL5 | chemokine (C-C motif) ligand 5 | NM_002985 |
| CCR3 | chemokine (C-C motif) receptor 3 | NM_001837 |
| CCR5 | chemokine (C-C motif) receptor 5 | NM_000579 |
| CD19 | CD19 Antigen | NM_001770 |
| CD4 | CD4 antigen (p55) | NM_000616 |
| CD86 | CD86 antigen (CD28 antigen ligand 2, B7-2 antigen) | NM_006889 |
| CD8A | CD8 antigen, alpha polypeptide | NM_001768 |
| CSF2 | colony stimulating factor 2 (granulocyte-macrophage) | NM_000758 |
| CTLA4 | cytotoxic T-lymphocyte-associated protein 4 | NM_005214 |
| CXCL1 | chemokine (C—X—C motif) ligand 1 (melanoma growth stimulating | NM_001511 |
| | activity, alpha) | |
| CXCL10 | chemokine (C—X—C moif) ligand 10 | NM_001565 |
| CXCR3 | chemokine (C—X—C motif) receptor 3 | NM_001504 |
| DPP4 | Dipeptidylpeptidase 4 | NM_001935 |
| EGR1 | early growth response-1 | NM_001964 |
| ELA2 | elastase 2, neutrophil | NM_001972 |
| GZMB | granzyme B (granzyme 2, cytotoxic T-lymphocyte-associated serine | NM_004131 |
| | esterase 1) | |
| HLA-DRA | major histocompatibility complex, class II, DR alpha | NM_019111 |
| HMGB1 | high-mobility group box 1 | NM_002128 |
| HMOX1 | heme oxygenase (decycling) 1 | NM_002133 |
| HSPA1A | heat shock protein 70 | NM_005345 |
| ICAM1 | Intercellular adhesion molecule 1 | NM_000201 |
| IFI16 | interferon inducible protein 16, gamma | NM_005531 |
| IFNG | interferon gamma | NM_000619 |
| IL10 | interleukin 10 | NM_000572 |
| IL12B | interleukin 12 p40 | NM_002187 |
| IL15 | Interleukin 15 | NM_000585 |
| IL18 | interleukin 18 | NM_001562 |
| IL18BP | IL-18 Binding Protein | NM_005699 |
| IL1B | interleukin 1, beta | NM_000576 |
| IL1R1 | interleukin 1 receptor, type I | NM_000877 |
| IL1RN | interleukin 1 receptor antagonist | NM_173843 |
| IL23A | interleukin 23, alpha subunit p19 | NM_016584 |
| IL32 | interleukin 32 | NM_001012631 |
| IL5 | interleukin 5 (colony-stimulating factor, eosinophil) | NM_000879 |
| IL6 | interleukin 6 (interferon, beta 2) | NM_000600 |
| IL8 | interleukin 8 | NM_000584 |
| IRF1 | interferon regulatory factor 1 | NM_002198 |
| LTA | lymphotoxin alpha (TNF superfamily, member 1) | NM_000595 |
| MAPK14 | mitogen-activated protein kinase 14 | NM_001315 |
| MHC2TA | class II, major histocompatibility complex, transactivator | NM_000246 |
| MIF | macrophage migration inhibitory factor (glycosylation-inhibiting factor) | NM_002415 |
| MMP12 | matrix metallopeptidase 12 (macrophage elastase) | NM_002426 |
| MMP9 | matrix metallopeptidase 9 (gelatinase B, 92 kDa gelatinase, 92 kDa type | NM_004994 |
| | IV collagenase) | |
| MNDA | myeloid cell nuclear differentiation antigen | NM_002432 |
| MYC | v-myc myelocytomatosis viral oncogene homolog (avian) | NM_002467 |
| NFKB1 | nuclear factor of kappa light polypeptide gene enhancer in B-cells 1 | NM_003998 |
| | (p105) | |
| PLA2G7 | phospholipase A2, group VII (platelet-activating factor acetylhydrolase, | NM_005084 |
| | plasma) | |
| PLAUR | plasminogen activator, urokinase receptor | NM_002659 |
| PTGS2 | prostaglandin-endoperoxide synthase 2 (prostaglandin G/H synthase and | NM_000963 |
| | cyclooxygenase) | |
| PTPRC | protein tyrosine phosphatase, receptor type, C | NM_002838 |
| SERPINA1 | serine (or cysteine) proteinase inhibitor, clade A (alpha-1 antiproteinase, | NM_000295 |
| | antitrypsin), member 1 | |
| SERPINE1 | serpin peptidase inhibitor, clade E (nexin, plasminogen activator | NM_000602 |
| | inhibitor type 1), member 1 | |
| SSI-3 | suppressor of cytokine signaling 3 | NM_003955 |
| TGFB1 | transforming growth factor, beta 1 (Camurati-Engelmann disease) | NM_000660 |
| TIMP1 | tissue inhibitor of metalloproteinase 1 | NM_003254 |
| TLR2 | toll-like receptor 2 | NM_003264 |
| TLR4 | toll-like receptor 4 | NM_003266 |
| TNF | tumor necrosis factor (TNF superfamily, member 2) | NM_000594 |
| TNFRSF13B | tumor necrosis factor receptor superfamily, member 13B | NM_012452 |
| TNFRSF1A | tumor necrosis factor receptor superfamily, member 1A | NM_001065 |
| TNFSF5 | CD40 ligand (TNF superfamily, member 5, hyper-IgM syndrome) | NM_000074 |
| TNFSF6 | Fas ligand (TNF superfamily, member 6) | NM_000639 |
| TOSO | Fas apoptotic inhibitory molecule 3 | NM_005449 |
| TXNRD1 | thioredoxin reductase | NM_003330 |
| VEGF | vascular endothelial growth factor | NM_003376 |

TABLE 3
Human Cancer General Precision Profile ™

| Gene | | Gene Accession |
|---|---|---|
| Symbol | Gene Name | Number |
| ABL1 | v-abl Abelson murine leukemia viral oncogene homolog 1 | NM_007313 |
| ABL2 | v-abl Abelson murine leukemia viral oncogene homolog 2 (arg, Abelson- | NM_007314 |
| | related gene) | |
| AKT1 | v-akt murine thymoma viral oncogene homolog 1 | NM_005163 |
| ANGPT1 | angiopoietin 1 | NM_001146 |
| ANGPT2 | angiopoietin 2 | NM_001147 |
| APAF1 | Apoptotic Protease Activating Factor 1 | NM_013229 |
| ATM | ataxia telangiectasia mutated (includes complementation groups A, C and | NM_138293 |
| | D) | |
| BAD | BCL2-antagonist of cell death | NM_004322 |
| BAX | BCL2-associated X protein | NM_138761 |
| BCL2 | BCL2-antagonist of cell death | NM_004322 |
| BRAF | v-raf murine sarcoma viral oncogene homolog B1 | NM_004333 |
| BRCA1 | breast cancer 1, early onset | NM_007294 |
| CASP8 | caspase 8, apoptosis-related cysteine peptidase | NM_001228 |
| CCNE1 | Cyclin E1 | NM_001238 |
| CDC25A | cell division cycle 25A | NM_001789 |
| CDK2 | cyclin-dependent kinase 2 | NM_001798 |
| CDK4 | cyclin-dependent kinase 4 | NM_000075 |
| CDK5 | Cyclin-dependent kinase 5 | NM_004935 |
| CDKN1A | cyclin-dependent kinase inhibitor 1A (p21, Cip1) | NM_000389 |
| CDKN2A | cyclin-dependent kinase inhibitor 2A (melanoma, p16, inhibits CDK4) | NM_000077 |
| CFLAR | CASP8 and FADD-like apoptosis regulator | NM_003879 |
| COL18A1 | collagen, type XVIII, alpha 1 | NM_030582 |
| E2F1 | E2F transcription factor 1 | NM_005225 |
| EGFR | epidermal growth factor receptor (erythroblastic leukemia viral (v-erb-b) | NM_005228 |
| | oncogene homolog, avian) | |
| EGR1 | Early growth response-1 | NM_001964 |
| ERBB2 | V-erb-b2 erythroblastic leukemia viral oncogene homolog 2, | NM_004448 |
| | neuro/glioblastoma derived oncogene homolog (avian) | |
| FAS | Fas (TNF receptor superfamily, member 6) | NM_000043 |
| FGFR2 | fibroblast growth factor receptor 2 (bacteria-expressed kinase, | NM_000141 |
| | keratinocyte growth factor receptor, craniofacial dysostosis 1) | |
| FOS | v-fos FBJ murine osteosarcoma viral oncogene homolog | NM_005252 |
| GZMA | Granzyme A (granzyme 1, cytotoxic T-lymphocyte-associated serine | NM_006144 |
| | esterase 3) | |
| HRAS | v-Ha-ras Harvey rat sarcoma viral oncogene homolog | NM_005343 |
| ICAM1 | Intercellular adhesion molecule 1 | NM_000201 |
| IFI6 | interferon, alpha-inducible protein 6 | NM_002038 |
| IFITM1 | interferon induced transmembrane protein 1 (9-27) | NM_003641 |
| IFNG | interferon gamma | NM_000619 |
| IGF1 | insulin-like growth factor 1 (somatomedin C) | NM_000618 |
| IGFBP3 | insulin-like growth factor binding protein 3 | NM_001013398 |
| IL18 | Interleukin 18 | NM_001562 |
| IL1B | Interleukin 1, beta | NM_000576 |
| IL8 | interleukin 8 | NM_000584 |
| ITGA1 | integrin, alpha 1 | NM_181501 |
| ITGA3 | integrin, alpha 3 (antigen CD49C, alpha 3 subunit of VLA-3 receptor) | NM_005501 |
| ITGAE | integrin, alpha E (antigen CD103, human mucosal lymphocyte antigen 1; | NM_002208 |
| | alpha polypeptide) | |
| ITGB1 | integrin, beta 1 (fibronectin receptor, beta polypeptide, antigen CD29 | NM_002211 |
| | includes MDF2, MSK12) | |
| JUN | v-jun sarcoma virus 17 oncogene homolog (avian) | NM_002228 |
| KDR | kinase insert domain receptor (a type III receptor tyrosine kinase) | NM_002253 |
| MCAM | melanoma cell adhesion molecule | NM_006500 |
| MMP2 | matrix metallopeptidase 2 (gelatinase A, 72 kDa gelatinase, 72 kDa type IV | NM_004530 |
| | collagenase) | |
| MMP9 | matrix metallopeptidase 9 (gelatinase B, 92 kDa gelatinase, 92 kDa type IV | NM_004994 |
| | collagenase) | |
| MSH2 | mutS homolog 2, colon cancer, nonpolyposis type 1 (E. coli) | NM_000251 |
| MYC | v-myc myelocytomatosis viral oncogene homolog (avian) | NM_002467 |
| MYCL1 | v-myc myelocytomatosis viral oncogene homolog 1, lung carcinoma | NM_001033081 |
| | derived (avian) | |
| NFKB1 | nuclear factor of kappa light polypeptide gene enhancer in B-cells 1 | NM_003998 |
| | (p105) | |
| NME1 | non-metastatic cells 1, protein (NM23A) expressed in | NM_198175 |
| NME4 | non-metastatic cells 4, protein expressed in | NM_005009 |
| NOTCH2 | Notch homolog 2 | NM_024408 |
| NOTCH4 | Notch homolog 4 (Drosophila) | NM_004557 |
| NRAS | neuroblastoma RAS viral (v-ras) oncogene homolog | NM_002524 |
| PCNA | proliferating cell nuclear antigen | NM_002592 |
| PDGFRA | platelet-derived growth factor receptor, alpha polypeptide | NM_006206 |
| PLAU | plasminogen activator, urokinase | NM_002658 |
| PLAUR | plasminogen activator, urokinase receptor | NM_002659 |
| PTCH1 | patched homolog 1 (Drosophila) | NM_000264 |
| PTEN | phosphatase and tensin homolog (mutated in multiple advanced cancers 1) | NM_000314 |
| RAF1 | v-raf-1 murine leukemia viral oncogene homolog 1 | NM_002880 |
| RB1 | retinoblastoma 1 (including osteosarcoma) | NM_000321 |
| RHOA | ras homolog gene family, member A | NM_001664 |
| RHOC | ras homolog gene family, member C | NM_175744 |
| S100A4 | S100 calcium binding protein A4 | NM_002961 |
| SEMA4D | sema domain, immunoglobulin domain (Ig), transmembrane domain (TM) | NM_006378 |
| | and short cytoplasmic domain, (semaphorin) 4D | |
| SERPINB5 | serpin peptidase inhibitor, clade B (ovalbumin), member 5 | NM_002639 |
| SERPINE1 | serpin peptidase inhibitor, clade E (nexin, plasminogen activator inhibitor | NM_000602 |
| | type 1), member 1 | |
| SKI | v-ski sarcoma viral oncogene homolog (avian) | NM_003036 |
| SKIL | SKI-like oncogene | NM_005414 |
| SMAD4 | SMAD family member 4 | NM_005359 |
| SOCS1 | suppressor of cytokine signaling 1 | NM_003745 |
| SRC | v-src sarcoma (Schmidt-Ruppin A-2) viral oncogene homolog (avian) | NM_198291 |
| TERT | telomerase-reverse transcriptase | NM_003219 |
| TGFB1 | transforming growth factor, beta 1 (Camurati-Engelmann disease) | NM_000660 |
| THBS1 | thrombospondin 1 | NM_003246 |
| TIMP1 | tissue inhibitor of metalloproteinase 1 | NM_003254 |
| TIMP3 | Tissue inhibitor of metalloproteinase 3 (Sorsby fundus dystrophy, | NM_000362 |
| | pseudoinflammatory) | |
| TNF | tumor necrosis factor (TNF superfamily, member 2) | NM_000594 |
| TNFRSF10A | tumor necrosis factor receptor superfamily, member 10a | NM_003844 |
| TNFRSF10B | tumor necrosis factor receptor superfamily, member 10b | NM_003842 |
| TNFRSF1A | tumor necrosis factor receptor superfamily, member 1A | NM_001065 |
| TP53 | tumor protein p53 (Li-Fraumeni syndrome) | NM_000546 |
| VEGF | vascular endothelial growth factor | NM_003376 |
| VHL | von Hippel-Lindau tumor suppressor | NM_000551 |
| WNT1 | wingless-type MMTV integration site family, member 1 | NM_005430 |
| WT1 | Wilms tumor 1 | NM_000378 |

TABLE 4
Precision Profile ™ for EGR1

| Gene | | Gene Accession |
|---|---|---|
| Symbol | Gene Name | Number |
| ALOX5 | arachidonate 5-lipoxygenase | NM_000698 |
| APOA1 | apolipoprotein A-I | NM_000039 |
| CCND2 | cyclin D2 | NM_001759 |
| CDKN2D | cyclin-dependent kinase inhibitor 2D (p19, inhibits CDK4) | NM_001800 |
| CEBPB | CCAAT/enhancer binding protein (C/EBP), beta | NM_005194 |
| CREBBP | CREB binding protein (Rubinstein-Taybi syndrome) | NM_004380 |
| EGFR | epidermal growth factor receptor (erythroblastic leukemia viral (v-erb-b) | NM_005228 |
| | oncogene homolog, avian) | |
| EGR1 | early growth response 1 | NM_001964 |
| EGR2 | early growth response 2 (Krox-20 homolog, Drosophila) | NM_000399 |
| EGR3 | early growth response 3 | NM_004430 |
| EGR4 | early growth response 4 | NM_001965 |
| EP300 | E1A binding protein p300 | NM_001429 |
| F3 | coagulation factor III (thromboplastin, tissue factor) | NM_001993 |
| FGF2 | fibroblast growth factor 2 (basic) | NM_002006 |
| FN1 | fibronectin 1 | NM_00212482 |
| FOS | v-fos FBJ murine osteosarcoma viral oncogene homolog | NM_005252 |
| ICAM1 | Intercellular adhesion molecule 1 | NM_000201 |
| JUN | jun oncogene | NM_002228 |
| MAP2K1 | mitogen-activated protein kinase kinase 1 | NM_002755 |
| MAPK1 | mitogen-activated protein kinase 1 | NM_002745 |
| NAB1 | NGFI-A binding protein 1 (EGR1 binding protein 1) | NM_005966 |
| NAB2 | NGFI-A binding protein 2 (EGR1 binding protein 2) | NM_005967 |
| NFATC2 | nuclear factor of activated T-cells, cytoplasmic, calcineurin-dependent 2 | NM_173091 |
| NFκB1 | nuclear factor of kappa light polypeptide gene enhancer in B-cells 1 | NM_003998 |
| | (p105) | |
| NR4A2 | nuclear receptor subfamily 4, group A, member 2 | NM_006186 |
| PDGFA | platelet-derived growth factor alpha polypeptide | NM_002607 |
| PLAU | plasminogen activator, urokinase | NM_002658 |
| PTEN | phosphatase and tensin homolog (mutated in multiple advanced cancers | NM_000314 |
| | 1) | |
| RAF1 | v-raf-1 murine leukemia viral oncogene homolog 1 | NM_002880 |
| S100A6 | S100 calcium binding protein A6 | NM_014624 |
| SERPINE1 | serpin peptidase inhibitor, clade E (nexin, plasminogen activator inhibitor | NM_000302 |
| | type 1), member 1 | |
| SMAD3 | SMAD, mothers against DPP homolog 3 (Drosophila) | NM_005902 |
| SRC | v-src sarcoma (Schmidt-Ruppin A-2) viral oncogene homolog (avian) | NM_198291 |
| TGFB1 | transforming growth factor, beta 1 | NM_000660 |
| THBS1 | thrombospondin 1 | NM_003246 |
| TOPBP1 | topoisomerase (DNA) II binding protein 1 | NM_007027 |
| TNFRSF6 | Fas (TNF receptor superfamily, member 6) | NM_000043 |
| TP53 | tumor protein p53 (Li-Fraumeni syndrome) | NM_000546 |
| WT1 | Wilms tumor 1 | NM_000378 |

TABLE 5
Cross-Cancer Precision Profile ™

| | | Gene Accession |
|---|---|---|
| Gene Symbol | Gene Name | Number |
| ACPP | acid phosphatase, prostate | NM_001099 |
| ADAM17 | a disintegrin and metalloproteinase domain 17 (tumor necrosis factor | NM_003183 |
| | alpha, converting enzyme) | |
| ANLN | anillin, actin binding protein (scraps homolog, Drosophila) | NM_018685 |
| APC | adenomatosis polyposis coli | NM_000038 |
| AXIN2 | axin 2 (conductin, axil) | NM_004655 |
| BAX | BCL2-associated X protein | NM_138761 |
| BCAM | basal cell adhesion molecule (Lutheran blood group) | NM_005581 |
| C1QA | complement component 1, q subcomponent, alpha polypeptide | NM_015991 |
| C1QB | complement component 1, q subcomponent, B chain | NM_000491 |
| CA4 | carbonic anhydrase IV | NM_000717 |
| CASP3 | caspase 3, apoptosis-related cysteine peptidase | NM_004346 |
| CASP9 | caspase 9, apoptosis-related cysteine peptidase | NM_001229 |
| CAV1 | caveolin 1, caveolae protein 22 kDa | NM_001753 |
| CCL3 | chemokine (C-C motif) ligand 3 | NM_002983 |
| CCL5 | chemokine (C-C motif) ligand 5 | NM_002985 |
| CCR7 | chemokine (C-C motif) receptor 7 | NM_001838 |
| CD40LG | CD40 ligand (TNF superfamily, member 5, hyper-IgM syndrome) | NM_000074 |
| CD59 | CD59 antigen p18-20 | NM_000611 |
| CD97 | CD97 molecule | NM_078481 |
| CDH1 | cadherin 1, type 1, E-cadherin (epithelial) | NM_004360 |
| CEACAM1 | carcinoembryonic antigen-related cell adhesion molecule 1 (biliary | NM_001712 |
| | glycoprotein) | |
| CNKSR2 | connector enhancer of kinase suppressor of Ras 2 | NM_014927 |
| CTNNA1 | catenin (cadherin-associated protein), alpha 1, 102 kDa | NM_001903 |
| CTSD | cathepsin D (lysosomal aspartyl peptidase) | NM_001909 |
| CXCL1 | chemokine (C—X—C motif) ligand 1 (melanoma growth stimulating | NM_001511 |
| | activity, alpha) | |
| DAD1 | defender against cell death 1 | NM_001344 |
| DIABLO | diablo homolog (Drosophila) | NM_019887 |
| DLC1 | deleted in liver cancer 1 | NM_182643 |
| E2F1 | E2F transcription factor 1 | NM_005225 |
| EGR1 | early growth response-1 | NM_001964 |
| ELA2 | elastase 2, neutrophil | NM_001972 |
| ESR1 | estrogen receptor 1 | NM_000125 |
| ESR2 | estrogen receptor 2 (ER beta) | NM_001437 |
| ETS2 | v-ets erythroblastosis virus E26 oncogene homolog 2 (avian) | NM_005239 |
| FOS | v-fos FBJ murine osteosarcoma viral oncogene homolog | NM_005252 |
| G6PD | glucose-6-phosphate dehydrogenase | NM_000402 |
| GADD45A | growth arrest and DNA-damage-inducible, alpha | NM_001924 |
| GNB1 | guanine nucleotide binding protein (G protein), beta polypeptide 1 | NM_002074 |
| GSK3B | glycogen synthase kinase 3 beta | NM_002093 |
| HMGA1 | high mobility group AT-hook 1 | NM_145899 |
| HMOX1 | heme oxygenase (decycling) 1 | NM_002133 |
| HOXA10 | homeobox A10 | NM_018951 |
| HSPA1A | heat shock protein 70 | NM_005345 |
| IFI16 | interferon inducible protein 16, gamma | NM_005531 |
| IGF2BP2 | insulin-like growth factor 2 mRNA binding protein 2 | NM_006548 |
| IGFBP3 | insulin-like growth factor binding protein 3 | NM_001013398 |
| IKBKE | inhibitor of kappa light polypeptide gene enhancer in B-cells, kinase | NM_014002 |
| | epsilon | |
| IL8 | interleukin 8 | NM_000584 |
| ING2 | inhibitor of growth family, member 2 | NM_001564 |
| IQGAP1 | IQ motif containing GTPase activating protein 1 | NM_003870 |
| IRF1 | interferon regulatory factor 1 | NM_002198 |
| ITGAL | integrin, alpha L (antigen CD11A (p180), lymphocyte function- | NM_002209 |
| | associated antigen 1; alpha polypeptide) | |
| LARGE | like-glycosyltransferase | NM_004737 |
| LGALS8 | lectin, galactoside-binding, soluble, 8 (galectin 8) | NM_006499 |
| LTA | lymphotoxin alpha (TNF superfamily, member 1) | NM_000595 |
| MAPK14 | mitogen-activated protein kinase 14 | NM_001315 |
| MCAM | melanoma cell adhesion molecule | NM_006500 |
| MEIS1 | Meis1, myeloid ecotropic viral integration site 1 homolog (mouse) | NM_002398 |
| MLH1 | mutL homolog 1, colon cancer, nonpolyposis type 2 (E. coli) | NM_000249 |
| MME | membrane metallo-endopeptidase (neutral endopeptidase, enkephalinase, | NM_000902 |
| | CALLA, CD10) | |
| MMP9 | matrix metallopeptidase 9 (gelatinase B, 92 kDa gelatinase, 92 kDa type | NM_004994 |
| | IV collagenase) | |
| MNDA | myeloid cell nuclear differentiation antigen | NM_002432 |
| MSH2 | mutS homolog 2, colon cancer, nonpolyposis type 1 (E. coli) | NM_000251 |
| MSH6 | mutS homolog 6 (E. coli) | NM_000179 |
| MTA1 | metastasis associated 1 | NM_004689 |
| MTF1 | metal-regulatory transcription factor 1 | NM_005955 |
| MYC | v-myc myelocytomatosis viral oncogene homolog (avian) | NM_002467 |
| MYD88 | myeloid differentiation primary response gene (88) | NM_002468 |
| NBEA | neurobeachin | NM_015678 |
| NCOA1 | nuclear receptor coactivator 1 | NM_003743 |
| NEDD4L | neural precursor cell expressed, developmentally down-regulated 4-like | NM_015277 |
| NRAS | neuroblastoma RAS viral (v-ras) oncogene homolog | NM_002524 |
| NUDT4 | nudix (nucleoside diphosphate linked moiety X)-type motif 4 | NM_019094 |
| PLAU | plasminogen activator, urokinase | NM_002658 |
| PLEK2 | pleckstrin 2 | NM_016445 |
| PLXDC2 | plexin domain containing 2 | NM_032812 |
| PPARG | peroxisome proliferative activated receptor, gamma | NM_138712 |
| PTEN | phosphatase and tensin homolog (mutated in multiple advanced cancers | NM_000314 |
| | 1) | |
| PTGS2 | prostaglandin-endoperoxide synthase 2 (prostaglandin G/H synthase and | NM_000963 |
| | cyclooxygenase) | |
| PTPRC | protein tyrosine phosphatase, receptor type, C | NM_002838 |
| PTPRK | protein tyrosine phosphatase, receptor type, K | NM_002844 |
| RBM5 | RNA binding motif protein 5 | NM_005778 |
| RP5- | invasion inhibitory protein 45 | NM_001025374 |
| 1077B9.4 | | |
| S100A11 | S100 calcium binding protein A11 | NM_005620 |
| S100A4 | S100 calcium binding protein A4 | NM_002961 |
| SCGB2A1 | secretoglobin, family 2A, member 1 | NM_002407 |
| SERPINA1 | serine (or cysteine) proteinase inhibitor, clade A (alpha-1 antiproteinase, | NM_000295 |
| | antitrypsin), member 1 | |
| SERPINE1 | serpin peptidase inhibitor, clade E (nexin, plasminogen activator | NM_000602 |
| | inhibitor type 1), member 1 | |
| SERPING1 | serpin peptidase inhibitor, clade G (C1 inhibitor), member 1, | NM_000062 |
| | (angioedema, hereditary) | |
| SIAH2 | seven in absentia homolog 2 (Drosophila) | NM_005067 |
| SLC43A1 | solute carrier family 43, member | NM_003627 |
| SP1 | Sp1 transcription factor | NM_138473 |
| SPARC | secreted protein, acidic, cysteine-rich (osteonectin) | NM_003118 |
| SRF | serum response factor (c-fos serum response element-binding | NM_003131 |
| | transcription factor) | |
| ST14 | suppression of tumorigenicity 14 (colon carcinoma) | NM_021978 |
| TEGT | testis enhanced gene transcript (BAX inhibitor 1) | NM_003217 |
| TGFB1 | transforming growth factor, beta 1 (Camurati-Engelmann disease) | NM_000660 |
| TIMP1 | tissue inhibitor of metalloproteinase 1 | NM_003254 |
| TLR2 | toll-like receptor 2 | NM_003264 |
| TNF | tumor necrosis factor (TNF superfamily, member 2) | NM_000594 |
| TNFRSF1A | tumor necrosis factor receptor superfamily, member 1A | NM_001065 |
| TXNRD1 | thioredoxin reductase | NM_003330 |
| UBE2C | ubiquitin-conjugating enzyme E2C | NM_007019 |
| USP7 | ubiquitin specific peptidase 7 (herpes virus-associated) | NM_003470 |
| VEGFA | vascular endothelial growth factor | NM_003376 |
| VIM | vimentin | NM_003380 |
| XK | X-linked Kx blood group (McLeod syndrome) | NM_021083 |
| XRCC1 | X-ray repair complementing defective repair in Chinese hamster cells 1 | NM_006297 |
| ZNF185 | zinc finger protein 185 (LIM domain) | NM_007150 |
| ZNF350 | zinc finger protein 350 | NM_021632 |

TABLE 6
Precision Profile ™ for Immunotherapy
Gene Symbol

ABL1
ABL2
ADAM17
ALOX5
CD19
CD4
CD40LG
CD86
CCR5
CTLA4
EGFR
ERBB2
HSPA1A
IFNG
IL12
IL15
IL23A
KIT
MUC1
MYC
PDGFRA
PTGS2
PTPRC
RAF1
TGFB1
TLR2
TNF
TNFRSF10B
TNFRSF13B
VEGF

TABLE 1A

| | | | | | | | | | | | total used | |
|---|---|---|---|---|---|---|---|---|---|---|---|---|
| | | | | | | | Normal | Colon | | | (excludes | |
| | | | | | | N = | 50 | 19 | | | missing) | |
| 2-gene models and | | Entropy | #normal | #normal | #cc | #cc | Correct | Correct | | | # | # |
| 1-gene models | | R-sq | Correct | FALSE | Correct | FALSE | Classification | Classification | p-val 1 | p-val 2 | normals | disease |
| MSH6 | PSEN2 | 0.55 | 42 | 6 | 16 | 3 | 87.5% | 84.2% | 6.6E−11 | 1.2E−06 | 48 | 19 |
| CA4 | MME | 0.49 | 44 | 6 | 17 | 2 | 88.0% | 89.5% | 2.2E−08 | 1.3E−08 | 50 | 19 |
| APC | CFLAR | 0.45 | 43 | 7 | 16 | 3 | 86.0% | 84.2% | 1.8E−09 | 2.2E−06 | 50 | 19 |
| AXIN2 | MUTYH | 0.44 | 39 | 10 | 16 | 3 | 79.6% | 84.2% | 2.4E−09 | 0.0012 | 49 | 19 |
| MSH6 | MUTYH | 0.44 | 43 | 6 | 16 | 3 | 87.8% | 84.2% | 3.0E−09 | 0.0001 | 49 | 19 |
| MSH2 | PSEN2 | 0.42 | 41 | 8 | 16 | 3 | 83.7% | 84.2% | 1.1E−08 | 0.0017 | 49 | 19 |
| AXIN2 | TNF | 0.41 | 41 | 9 | 15 | 4 | 82.0% | 79.0% | 1.6E−06 | 0.0054 | 50 | 19 |
| AXIN2 | IGFBP4 | 0.39 | 42 | 8 | 16 | 3 | 84.0% | 84.2% | 2.2E−08 | 0.0095 | 50 | 19 |
| MSH2 | MUTYH | 0.39 | 39 | 10 | 15 | 4 | 79.6% | 79.0% | 2.3E−08 | 0.0093 | 49 | 19 |
| BAX | MSH6 | 0.39 | 42 | 7 | 16 | 3 | 85.7% | 84.2% | 0.0011 | 5.6E−08 | 49 | 19 |
| ACSL5 | AXIN2 | 0.39 | 39 | 11 | 16 | 3 | 78.0% | 84.2% | 0.0143 | 2.2E−08 | 50 | 19 |
| AXIN2 | MSH2 | 0.38 | 44 | 6 | 15 | 4 | 88.0% | 79.0% | 0.0097 | 0.0149 | 50 | 19 |
| MSH6 | TNF | 0.38 | 39 | 10 | 15 | 4 | 79.6% | 79.0% | 4.7E−06 | 0.0015 | 49 | 19 |
| MSH2 | S100P | 0.38 | 39 | 11 | 15 | 4 | 78.0% | 79.0% | 4.9E−07 | 0.0123 | 50 | 19 |
| MSH6 | NME1 | 0.38 | 40 | 9 | 14 | 4 | 81.6% | 77.8% | 8.0E−08 | 0.0029 | 49 | 18 |
| MSH2 | NME1 | 0.38 | 39 | 11 | 15 | 3 | 78.0% | 83.3% | 7.9E−08 | 0.0178 | 50 | 18 |
| AXIN2 | PSEN2 | 0.37 | 38 | 11 | 16 | 3 | 77.6% | 84.2% | 8.7E−08 | 0.0199 | 49 | 19 |
| ACSL5 | MSH6 | 0.37 | 39 | 10 | 15 | 4 | 79.6% | 79.0% | 0.0021 | 4.5E−08 | 49 | 19 |
| MSH6 | VEGF | 0.37 | 43 | 6 | 15 | 4 | 87.8% | 79.0% | 8.8E−08 | 0.0023 | 49 | 19 |
| CD63 | MSH6 | 0.37 | 40 | 9 | 15 | 4 | 81.6% | 79.0% | 0.0024 | 5.0E−08 | 49 | 19 |
| APC | AXIN2 | 0.37 | 40 | 10 | 15 | 4 | 80.0% | 79.0% | 0.0350 | 6.3E−05 | 50 | 19 |
| MSH6 | TP53 | 0.37 | 37 | 12 | 14 | 4 | 75.5% | 77.8% | 1.8E−07 | 0.0051 | 49 | 18 |
| CFLAR | MSH2 | 0.37 | 41 | 9 | 16 | 3 | 82.0% | 84.2% | 0.0229 | 5.0E−08 | 50 | 19 |
| AXIN2 | MSH6 | 0.36 | 43 | 6 | 15 | 4 | 87.8% | 79.0% | 0.0030 | 0.0425 | 49 | 19 |
| MSH6 | S100A4 | 0.36 | 38 | 10 | 15 | 4 | 79.2% | 79.0% | 2.5E−07 | 0.0027 | 48 | 19 |
| AXIN2 | GSK3B | 0.36 | 43 | 7 | 15 | 4 | 86.0% | 79.0% | 3.4E−06 | 0.0415 | 50 | 19 |
| AXIN2 | MME | 0.36 | 40 | 10 | 16 | 3 | 80.0% | 84.2% | 4.8E−06 | 0.0439 | 50 | 19 |
| CFLAR | MSH6 | 0.36 | 40 | 9 | 15 | 4 | 81.6% | 79.0% | 0.0035 | 7.0E−08 | 49 | 19 |
| MSH2 | TNF | 0.36 | 41 | 9 | 16 | 3 | 82.0% | 84.2% | 1.1E−05 | 0.0294 | 50 | 19 |
| MSH2 | VEGF | 0.36 | 41 | 9 | 16 | 3 | 82.0% | 84.2% | 1.3E−07 | 0.0295 | 50 | 19 |
| MSH2 | RPS3A | 0.36 | 38 | 12 | 15 | 4 | 76.0% | 79.0% | 1.2E−07 | 0.0305 | 50 | 19 |
| AXIN2 | MYC | 0.36 | 44 | 6 | 15 | 4 | 88.0% | 79.0% | 8.9E−08 | 0.0475 | 50 | 19 |
| AXIN2 | ZNF350 | 0.36 | 38 | 12 | 15 | 4 | 76.0% | 79.0% | 1.0E−05 | 0.0479 | 50 | 19 |
| MSH2 | S100A4 | 0.35 | 41 | 8 | 15 | 4 | 83.7% | 79.0% | 4.1E−07 | 0.0341 | 49 | 19 |
| MSH6 | S100P | 0.34 | 37 | 12 | 15 | 4 | 75.5% | 79.0% | 2.6E−06 | 0.0098 | 49 | 19 |
| GADD45A | GSK3B | 0.33 | 42 | 8 | 15 | 4 | 84.0% | 79.0% | 1.4E−05 | 4.9E−05 | 50 | 19 |
| MGMT | MSH6 | 0.33 | 39 | 9 | 15 | 4 | 81.3% | 79.0% | 0.0142 | 3.0E−07 | 48 | 19 |
| IGFBP4 | MSH6 | 0.33 | 42 | 7 | 15 | 4 | 85.7% | 79.0% | 0.0164 | 3.7E−07 | 49 | 19 |
| CCND3 | MSH6 | 0.32 | 38 | 10 | 15 | 4 | 79.2% | 79.0% | 0.0231 | 1.1E−06 | 48 | 19 |
| AXIN2 | | 0.31 | 40 | 10 | 15 | 4 | 80.0% | 79.0% | 4.9E−07 | | 50 | 19 |
| MSH6 | VIL1 | 0.31 | 37 | 12 | 15 | 4 | 75.5% | 79.0% | 2.5E−05 | 0.0357 | 49 | 19 |
| CD44 | MSH6 | 0.31 | 37 | 12 | 15 | 4 | 75.5% | 79.0% | 0.0384 | 1.4E−06 | 49 | 19 |
| MSH6 | RPS3A | 0.31 | 38 | 11 | 15 | 4 | 77.6% | 79.0% | 1.2E−06 | 0.0442 | 49 | 19 |
| MSH2 | | 0.30 | 38 | 12 | 15 | 4 | 76.0% | 79.0% | 7.2E−07 | | 50 | 19 |
| CA4 | GSK3B | 0.29 | 40 | 10 | 15 | 4 | 80.0% | 79.0% | 7.2E−05 | 5.7E−05 | 50 | 19 |
| APC | S100P | 0.28 | 38 | 12 | 15 | 4 | 76.0% | 79.0% | 3.0E−05 | 0.0024 | 50 | 19 |
| ITGA3 | TNF | 0.28 | 40 | 10 | 15 | 4 | 80.0% | 79.0% | 0.0004 | 1.9E−05 | 50 | 19 |
| CD44 | NFKB1 | 0.26 | 39 | 11 | 15 | 4 | 78.0% | 79.0% | 1.7E−05 | 9.6E−06 | 50 | 19 |
| APC | VEGF | 0.26 | 40 | 10 | 15 | 4 | 80.0% | 79.0% | 9.4E−06 | 0.0070 | 50 | 19 |
| APC | NME1 | 0.26 | 39 | 11 | 14 | 4 | 78.0% | 77.8% | 1.0E−05 | 0.0151 | 50 | 18 |
| MSH6 | | 0.26 | 37 | 12 | 15 | 4 | 75.5% | 79.0% | 5.7E−06 | | 49 | 19 |
| GADD45A | MME | 0.24 | 39 | 11 | 15 | 4 | 78.0% | 79.0% | 0.0010 | 0.0027 | 50 | 19 |
| GADD45A | MLH1 | 0.21 | 42 | 8 | 15 | 4 | 84.0% | 79.0% | 0.0053 | 0.0077 | 50 | 19 |
| ALDH1A1 | TNF | 0.20 | 40 | 10 | 15 | 4 | 80.0% | 79.0% | 0.0103 | 0.0002 | 50 | 19 |
| CA4 | NFKB1 | 0.19 | 39 | 11 | 15 | 4 | 78.0% | 79.0% | 0.0004 | 0.0043 | 50 | 19 |
| BAX | ITGA3 | 0.15 | 39 | 11 | 15 | 4 | 78.0% | 79.0% | 0.0040 | 0.0013 | 50 | 19 |

TABLE 1B

| | Colon | Normals | Sum |
|---|---|---|---|
| Group Size | 27.5% | 72.5% | 100% |
| N = | 19 | 50 | 69 |

| Gene | Mean | Mean | Z-statistic | p-val |
|---|---|---|---|---|
| AXIN2 | 19.9 | 18.8 | 5.03 | 4.9E−07 |
| MSH2 | 18.5 | 17.7 | 4.96 | 7.2E−07 |
| MSH6 | 19.7 | 19.0 | 4.54 | 5.7E−06 |
| APC | 18.2 | 17.5 | 3.71 | 0.0002 |
| GADD45A | 18.8 | 19.5 | −3.20 | 0.0014 |
| TNF | 18.1 | 18.5 | −3.16 | 0.0016 |
| ZNF350 | 19.6 | 19.1 | 3.13 | 0.0018 |
| MLH1 | 18.0 | 17.5 | 3.10 | 0.0019 |
| MME | 15.4 | 14.8 | 2.91 | 0.0036 |
| GSK3B | 16.2 | 15.8 | 2.81 | 0.0050 |
| CA4 | 18.1 | 18.8 | −2.72 | 0.0065 |
| VIL1 | 19.9 | 20.6 | −2.69 | 0.0072 |
| TGFBR1 | 18.6 | 18.3 | 2.57 | 0.0103 |
| CA2 | 16.3 | 16.7 | −2.39 | 0.0167 |
| S100P | 16.3 | 17.2 | −2.35 | 0.0189 |
| BCL2 | 16.4 | 16.1 | 2.06 | 0.0397 |
| ITGA3 | 22.2 | 21.9 | 2.03 | 0.0427 |
| NFKB1 | 16.9 | 16.7 | 1.72 | 0.0859 |
| ALDH1A1 | 18.6 | 18.3 | 1.69 | 0.0914 |
| S100A4 | 12.9 | 13.1 | −1.68 | 0.0932 |
| IL8 | 22.2 | 21.7 | 1.64 | 0.1010 |
| BAX | 15.3 | 15.5 | −1.43 | 0.1529 |
| CCND3 | 14.1 | 14.3 | −1.38 | 0.1673 |
| CD44 | 13.7 | 13.9 | −1.34 | 0.1791 |
| ACSS2 | 19.3 | 19.1 | 1.29 | 0.1959 |
| AFAP | 18.3 | 18.1 | 1.25 | 0.2118 |
| PSEN2 | 19.4 | 19.6 | −1.22 | 0.2230 |
| VEGF | 23.0 | 23.3 | −1.18 | 0.2395 |
| CFD | 13.8 | 14.1 | −1.11 | 0.2684 |
| RPS3A | 15.9 | 16.1 | −1.10 | 0.2697 |
| TP53 | 16.0 | 15.9 | 1.03 | 0.3039 |
| ERBB2 | 22.4 | 22.2 | 1.02 | 0.3078 |
| ZYX | 12.1 | 12.3 | −1.00 | 0.3173 |
| NME1 | 19.2 | 19.3 | −0.93 | 0.3537 |
| IGFBP4 | 21.3 | 21.4 | −0.83 | 0.4078 |
| CXCL1 | 19.1 | 19.3 | −0.81 | 0.4202 |
| BRAF | 17.2 | 17.1 | 0.80 | 0.4233 |
| MYC | 18.2 | 18.1 | 0.80 | 0.4247 |
| TCF4 | 19.6 | 19.5 | 0.78 | 0.4363 |
| RGC32 | 18.0 | 17.9 | 0.57 | 0.5685 |
| CD63 | 15.0 | 15.0 | −0.42 | 0.6754 |
| NUAK1 | 23.4 | 23.5 | −0.42 | 0.6774 |
| PTGS2 | 17.1 | 17.1 | −0.42 | 0.6780 |
| MUTYH | 19.4 | 19.4 | −0.39 | 0.6961 |
| MGMT | 19.4 | 19.5 | −0.36 | 0.7156 |
| IGF2 | 21.4 | 21.5 | −0.33 | 0.7407 |
| MKI67 | 22.2 | 22.2 | −0.15 | 0.8792 |
| ACSL5 | 17.8 | 17.8 | 0.15 | 0.8832 |
| CFLAR | 14.8 | 14.8 | 0.13 | 0.9000 |

TABLE 1C

| | | | | | | Predicted |
|---|---|---|---|---|---|---|
| | | | | | | probability |
| | | | | | | of colon |
| Patient ID | Group | MSH6 | PSEN2 | logit | odds | cancer |
| CC-017 | Colon | 21.71 | 19.51 | 16.26 | 1.2E+07 | 1.0000 |
| CC-019 | Colon | 19.86 | 18.65 | 8.35 | 4.2E+03 | 0.9998 |
| CC-020 | Colon | 20.14 | 19.14 | 7.47 | 1.8E+03 | 0.9994 |
| CC-007 | Colon | 20.91 | 20.20 | 6.60 | 7.3E+02 | 0.9986 |
| CC-003 | Colon | 19.35 | 18.41 | 6.25 | 5.2E+02 | 0.9981 |
| CC-011 | Colon | 19.52 | 19.19 | 2.75 | 1.6E+01 | 0.9400 |
| CC-005 | Colon | 20.21 | 20.04 | 2.61 | 1.4E+01 | 0.9314 |
| CC-014 | Colon | 19.83 | 19.65 | 2.22 | 9.2E+00 | 0.9020 |
| CC-012 | Colon | 19.70 | 19.58 | 1.74 | 5.7E+00 | 0.8506 |
| CC-013 | Colon | 19.76 | 19.72 | 1.33 | 3.8E+00 | 0.7916 |
| CC-002 | Colon | 19.05 | 18.89 | 1.30 | 3.7E+00 | 0.7851 |
| CC-006 | Colon | 19.65 | 19.62 | 1.12 | 3.1E+00 | 0.7542 |
| CC-009 | Colon | 19.07 | 18.98 | 0.85 | 2.3E+00 | 0.6998 |
| CC-010 | Colon | 20.30 | 20.47 | 0.65 | 1.9E+00 | 0.6569 |
| HN-036-CC | Normal | 18.90 | 18.83 | 0.60 | 1.8E+00 | 0.6465 |
| HN-014-CC | Normal | 19.26 | 19.30 | 0.29 | 1.3E+00 | 0.5710 |
| HN-049-CC | Normal | 19.58 | 19.70 | 0.16 | 1.2E+00 | 0.5404 |
| CC-008 | Colon | 19.82 | 19.99 | 0.13 | 1.1E+00 | 0.5335 |
| HN-046-CC | Normal | 18.86 | 18.88 | −0.05 | 9.5E−01 | 0.4877 |
| HN-030-CC | Normal | 19.82 | 20.05 | −0.23 | 7.9E−01 | 0.4417 |
| HN-004-CC | Normal | 18.76 | 18.90 | −0.86 | 4.2E−01 | 0.2964 |
| CC-018 | Colon | 18.85 | 19.01 | −0.90 | 4.1E−01 | 0.2895 |
| HN-001-CC | Normal | 19.88 | 20.24 | −0.93 | 3.9E−01 | 0.2829 |
| HN-029-CC | Normal | 19.81 | 20.17 | −0.96 | 3.8E−01 | 0.2760 |
| HN-008-CC | Normal | 18.62 | 18.81 | −1.31 | 2.7E−01 | 0.2127 |
| HN-035-CC | Normal | 19.00 | 19.27 | −1.35 | 2.6E−01 | 0.2056 |
| HN-047-CC | Normal | 18.89 | 19.14 | −1.36 | 2.6E−01 | 0.2041 |
| HN-009-CC | Normal | 18.87 | 19.16 | −1.60 | 2.0E−01 | 0.1679 |
| HN-033-CC | Normal | 20.00 | 20.53 | −1.80 | 1.7E−01 | 0.1416 |
| HN-026-CC | Normal | 19.27 | 19.67 | −1.84 | 1.6E−01 | 0.1369 |
| CC-015 | Colon | 19.22 | 19.61 | −1.86 | 1.6E−01 | 0.1344 |
| HN-034-CC | Normal | 19.37 | 19.81 | −1.96 | 1.4E−01 | 0.1236 |
| HN-013-CC | Normal | 18.97 | 19.35 | −2.00 | 1.4E−01 | 0.1191 |
| CC-004 | Colon | 19.24 | 19.67 | −2.03 | 1.3E−01 | 0.1162 |
| HN-044-CC | Normal | 18.53 | 18.86 | −2.27 | 1.0E−01 | 0.0935 |
| HN-041-CC | Normal | 19.00 | 19.47 | −2.54 | 7.9E−02 | 0.0728 |
| HN-024-CC | Normal | 19.48 | 20.05 | −2.56 | 7.7E−02 | 0.0716 |
| HN-010-CC | Normal | 19.00 | 19.48 | −2.63 | 7.2E−02 | 0.0671 |
| HN-040-CC | Normal | 19.40 | 19.97 | −2.67 | 6.9E−02 | 0.0647 |
| HN-048-CC | Normal | 18.68 | 19.14 | −2.83 | 5.9E−02 | 0.0555 |
| CC-001 | Colon | 18.37 | 18.78 | −2.93 | 5.4E−02 | 0.0508 |
| HN-032-CC | Normal | 19.20 | 19.79 | −2.98 | 5.1E−02 | 0.0485 |
| HN-025-CC | Normal | 18.95 | 19.53 | −3.24 | 3.9E−02 | 0.0376 |
| HN-050-CC | Normal | 19.05 | 19.65 | −3.31 | 3.7E−02 | 0.0353 |
| HN-015-CC | Normal | 18.93 | 19.54 | −3.49 | 3.1E−02 | 0.0296 |
| HN-011-CC | Normal | 19.04 | 19.75 | −3.88 | 2.1E−02 | 0.0201 |
| HN-016-CC | Normal | 19.37 | 20.17 | −4.10 | 1.7E−02 | 0.0162 |
| HN-039-CC | Normal | 18.42 | 19.06 | −4.18 | 1.5E−02 | 0.0151 |
| HN-038-CC | Normal | 18.61 | 19.31 | −4.34 | 1.3E−02 | 0.0129 |
| HN-031-CC | Normal | 18.84 | 19.63 | −4.64 | 9.6E−03 | 0.0095 |
| HN-022-CC | Normal | 19.98 | 21.01 | −4.72 | 8.9E−03 | 0.0088 |
| HN-003-CC | Normal | 18.85 | 19.70 | −4.93 | 7.2E−03 | 0.0072 |
| HN-019-CC | Normal | 18.77 | 19.62 | −5.05 | 6.4E−03 | 0.0064 |
| HN-023-CC | Normal | 18.52 | 19.33 | −5.08 | 6.2E−03 | 0.0062 |
| HN-043-CC | Normal | 18.59 | 19.42 | −5.12 | 6.0E−03 | 0.0060 |
| HN-045-CC | Normal | 18.77 | 19.64 | −5.16 | 5.7E−03 | 0.0057 |
| HN-027-CC | Normal | 18.73 | 19.62 | −5.33 | 4.9E−03 | 0.0048 |
| HN-021-CC | Normal | 18.49 | 19.34 | −5.38 | 4.6E−03 | 0.0046 |
| HN-018-CC | Normal | 18.46 | 19.34 | −5.57 | 3.8E−03 | 0.0038 |
| HN-028-CC | Normal | 19.05 | 20.05 | −5.65 | 3.5E−03 | 0.0035 |
| HN-012-CC | Normal | 18.64 | 19.57 | −5.66 | 3.5E−03 | 0.0035 |
| HN-006-CC | Normal | 18.52 | 19.45 | −5.86 | 2.9E−03 | 0.0029 |
| HN-042-CC | Normal | 18.35 | 19.26 | −5.88 | 2.8E−03 | 0.0028 |
| HN-005-CC | Normal | 18.36 | 19.38 | −6.52 | 1.5E−03 | 0.0015 |
| HN-020-CC | Normal | 18.26 | 19.50 | −7.96 | 3.5E−04 | 0.0003 |
| HN-007-CC | Normal | 18.08 | 19.38 | −8.44 | 2.2E−04 | 0.0002 |
| HN-017-CC | Normal | 18.93 | 20.51 | −9.22 | 9.9E−05 | 0.0001 |

TABLE 2a

| | | | | | | | | | | | total used | |
|---|---|---|---|---|---|---|---|---|---|---|---|---|
| | | | | | | | Normal | Colon | | | (excludes | |
| | | En- | | | | N = | 32 | 18 | | | missing) | |
| 2-gene models and | | tropy | #normal | #normal | #ci | #ci | Correct | Correct | | | # | # |
| 1-gene models | | R-sq | Correct | FALSE | Correct | FALSE | Classification | Classification | p-val 1 | p-val 2 | normals | disease |
| HMOX1 | TXNRD1 | 0.67 | 30 | 2 | 17 | 1 | 93.8% | 94.4% | 2.3E−09 | 2.1E−08 | 32 | 18 |
| C1QA | LTA | 0.61 | 28 | 4 | 16 | 2 | 87.5% | 88.9% | 8.3E−08 | 0.0017 | 32 | 18 |
| DPP4 | IL32 | 0.60 | 29 | 3 | 16 | 2 | 90.6% | 88.9% | 5.7E−09 | 6.3E−08 | 32 | 18 |
| C1QA | TXNRD1 | 0.59 | 29 | 3 | 16 | 2 | 90.6% | 88.9% | 3.9E−08 | 0.0030 | 32 | 18 |
| CCR5 | DPP4 | 0.58 | 28 | 4 | 16 | 2 | 87.5% | 88.9% | 1.4E−07 | 6.1E−08 | 32 | 18 |
| C1QA | PTGS2 | 0.57 | 29 | 3 | 16 | 2 | 90.6% | 88.9% | 2.5E−09 | 0.0060 | 32 | 18 |
| APAF1 | C1QA | 0.57 | 29 | 3 | 16 | 2 | 90.6% | 88.9% | 0.0069 | 5.5E−08 | 32 | 18 |
| CCR5 | LTA | 0.56 | 30 | 2 | 16 | 2 | 93.8% | 88.9% | 3.8E−07 | 1.0E−07 | 32 | 18 |
| C1QA | PTPRC | 0.55 | 27 | 5 | 16 | 2 | 84.4% | 88.9% | 6.1E−09 | 0.0118 | 32 | 18 |
| C1QA | TNFRSF13 | 0.55 | 27 | 5 | 15 | 3 | 84.4% | 83.3% | 9.6E−09 | 0.0118 | 32 | 18 |
| C1QA | IL8 | 0.55 | 29 | 3 | 16 | 2 | 90.6% | 88.9% | 7.3E−07 | 0.0122 | 32 | 18 |
| C1QA | TLR4 | 0.55 | 26 | 6 | 16 | 2 | 81.3% | 88.9% | 7.8E−09 | 0.0126 | 32 | 18 |
| C1QA | CASP3 | 0.54 | 30 | 2 | 16 | 2 | 93.8% | 88.9% | 2.7E−07 | 0.0160 | 32 | 18 |
| C1QA | HSPA1A | 0.54 | 30 | 2 | 16 | 2 | 93.8% | 88.9% | 2.8E−09 | 0.0173 | 32 | 18 |
| TGFB1 | TXNRD1 | 0.54 | 29 | 3 | 15 | 3 | 90.6% | 83.3% | 2.4E−07 | 1.6E−06 | 32 | 18 |
| APAF1 | PLAUR | 0.54 | 28 | 4 | 16 | 2 | 87.5% | 88.9% | 2.7E−07 | 1.6E−07 | 32 | 18 |
| C1QA | MMP12 | 0.53 | 29 | 3 | 16 | 2 | 90.6% | 88.9% | 3.6E−09 | 0.0234 | 32 | 18 |
| C1QA | IL5 | 0.53 | 26 | 6 | 15 | 3 | 81.3% | 83.3% | 5.9E−09 | 0.0250 | 32 | 18 |
| C1QA | IL15 | 0.52 | 27 | 5 | 15 | 3 | 84.4% | 83.3% | 2.0E−08 | 0.0406 | 32 | 18 |
| CCL5 | LTA | 0.51 | 28 | 4 | 16 | 2 | 87.5% | 88.9% | 1.8E−06 | 8.2E−06 | 32 | 18 |
| CCR5 | TNFSF5 | 0.51 | 27 | 5 | 15 | 3 | 84.4% | 83.3% | 9.0E−07 | 5.0E−07 | 32 | 18 |
| TNF | TNFSF5 | 0.51 | 28 | 4 | 16 | 2 | 87.5% | 88.9% | 9.1E−07 | 6.4E−06 | 32 | 18 |
| CD4 | TGFB1 | 0.51 | 29 | 3 | 15 | 3 | 90.6% | 83.3% | 4.1E−06 | 1.2E−08 | 32 | 18 |
| LTA | TNF | 0.50 | 28 | 4 | 16 | 2 | 87.5% | 88.9% | 9.6E−06 | 2.8E−06 | 32 | 18 |
| NFKB1 | TGFB1 | 0.50 | 31 | 1 | 15 | 3 | 96.9% | 83.3% | 6.2E−06 | 2.2E−08 | 32 | 18 |
| HMOX1 | PTPRC | 0.49 | 29 | 3 | 16 | 2 | 90.6% | 88.9% | 4.6E−08 | 1.0E−05 | 32 | 18 |
| LTA | TGFB1 | 0.49 | 27 | 5 | 15 | 3 | 84.4% | 83.3% | 7.6E−06 | 4.2E−06 | 32 | 18 |
| APAF1 | TLR2 | 0.48 | 28 | 4 | 16 | 2 | 87.5% | 88.9% | 1.5E−07 | 1.2E−06 | 32 | 18 |
| MAPK14 | TXNRD1 | 0.47 | 25 | 7 | 15 | 3 | 78.1% | 83.3% | 2.3E−06 | 3.7E−08 | 32 | 18 |
| PLAUR | TXNRD1 | 0.47 | 28 | 4 | 15 | 3 | 87.5% | 83.3% | 2.5E−06 | 2.8E−06 | 32 | 18 |
| TIMP1 | TXNRD1 | 0.47 | 26 | 6 | 15 | 3 | 81.3% | 83.3% | 2.6E−06 | 1.8E−07 | 32 | 18 |
| APAF1 | TGFB1 | 0.46 | 28 | 4 | 15 | 3 | 87.5% | 83.3% | 2.2E−05 | 2.1E−06 | 32 | 18 |
| HMOX1 | NFKB1 | 0.46 | 26 | 6 | 15 | 3 | 81.3% | 83.3% | 8.1E−08 | 3.4E−05 | 32 | 18 |
| C1QA | | 0.46 | 28 | 4 | 15 | 3 | 87.5% | 83.3% | 4.9E−08 | | 32 | 18 |
| HMOX1 | LTA | 0.45 | 26 | 6 | 15 | 3 | 81.3% | 83.3% | 1.5E−05 | 3.7E−05 | 32 | 18 |
| IL32 | TNFSF5 | 0.45 | 26 | 6 | 15 | 3 | 81.3% | 83.3% | 6.9E−06 | 7.9E−07 | 32 | 18 |
| IL32 | TOSO | 0.45 | 27 | 4 | 16 | 2 | 87.1% | 88.9% | 9.2E−07 | 1.2E−06 | 31 | 18 |
| ICAM1 | TXNRD1 | 0.45 | 27 | 5 | 15 | 3 | 84.4% | 83.3% | 4.3E−06 | 1.1E−06 | 32 | 18 |
| APAF1 | HMOX1 | 0.45 | 27 | 5 | 16 | 2 | 84.4% | 88.9% | 4.5E−05 | 3.0E−06 | 32 | 18 |
| APAF1 | CASP1 | 0.44 | 26 | 6 | 15 | 3 | 81.3% | 83.3% | 5.7E−07 | 3.5E−06 | 32 | 18 |
| CCL5 | TNFSF5 | 0.44 | 27 | 5 | 15 | 3 | 84.4% | 83.3% | 9.8E−06 | 9.4E−05 | 32 | 18 |
| DPP4 | TNF | 0.44 | 27 | 5 | 15 | 3 | 84.4% | 83.3% | 7.1E−05 | 1.3E−05 | 32 | 18 |
| IL18BP | TOSO | 0.44 | 25 | 5 | 15 | 3 | 83.3% | 83.3% | 2.6E−06 | 6.2E−07 | 30 | 18 |
| CCL5 | TOSO | 0.43 | 25 | 6 | 15 | 3 | 80.7% | 83.3% | 1.7E−06 | 0.0002 | 31 | 18 |
| CCR5 | TOSO | 0.43 | 24 | 7 | 14 | 4 | 77.4% | 77.8% | 2.1E−06 | 2.2E−05 | 31 | 18 |
| CCL5 | DPP4 | 0.42 | 27 | 5 | 15 | 3 | 84.4% | 83.3% | 2.7E−05 | 0.0002 | 32 | 18 |
| TGFB1 | TNFSF5 | 0.42 | 26 | 6 | 14 | 4 | 81.3% | 77.8% | 2.5E−05 | 9.8E−05 | 32 | 18 |
| IL32 | LTA | 0.42 | 27 | 5 | 15 | 3 | 84.4% | 83.3% | 5.5E−05 | 2.9E−06 | 32 | 18 |
| ADAM17 | HMOX1 | 0.41 | 26 | 6 | 15 | 3 | 81.3% | 83.3% | 0.0002 | 2.1E−06 | 32 | 18 |
| CCR5 | TXNRD1 | 0.41 | 26 | 6 | 15 | 3 | 81.3% | 83.3% | 2.0E−05 | 2.0E−05 | 32 | 18 |
| DPP4 | TGFB1 | 0.41 | 27 | 5 | 14 | 4 | 84.4% | 77.8% | 0.0001 | 4.8E−05 | 32 | 18 |
| PLAUR | PTGS2 | 0.40 | 26 | 6 | 15 | 3 | 81.3% | 83.3% | 7.1E−07 | 2.4E−05 | 32 | 18 |
| ADAM17 | CASP1 | 0.40 | 26 | 6 | 15 | 3 | 81.3% | 83.3% | 2.4E−06 | 2.7E−06 | 32 | 18 |
| CD4 | HMOX1 | 0.40 | 26 | 6 | 15 | 3 | 81.3% | 83.3% | 0.0002 | 4.4E−07 | 32 | 18 |
| CASP1 | TXNRD1 | 0.40 | 26 | 6 | 15 | 3 | 81.3% | 83.3% | 2.4E−05 | 2.6E−06 | 32 | 18 |
| ALOX5 | TXNRD1 | 0.40 | 25 | 7 | 14 | 4 | 78.1% | 77.8% | 2.6E−05 | 5.3E−07 | 32 | 18 |
| MHC2TA | TNFSF5 | 0.40 | 29 | 3 | 15 | 3 | 90.6% | 83.3% | 5.1E−05 | 1.2E−05 | 32 | 18 |
| IL18BP | LTA | 0.39 | 27 | 4 | 15 | 3 | 87.1% | 83.3% | 0.0001 | 1.8E−06 | 31 | 18 |
| TNF | TXNRD1 | 0.39 | 27 | 5 | 15 | 3 | 84.4% | 83.3% | 3.1E−05 | 0.0004 | 32 | 18 |
| MYC | TNF | 0.39 | 27 | 5 | 15 | 3 | 84.4% | 83.3% | 0.0004 | 1.1E−06 | 32 | 18 |
| CCL5 | MYC | 0.39 | 25 | 7 | 15 | 3 | 78.1% | 83.3% | 1.1E−06 | 0.0006 | 32 | 18 |
| SERPINA1 | TXNRD1 | 0.39 | 26 | 6 | 15 | 3 | 81.3% | 83.3% | 3.7E−05 | 7.7E−07 | 32 | 18 |
| MHC2TA | PLA2G7 | 0.39 | 28 | 4 | 15 | 3 | 87.5% | 83.3% | 2.5E−05 | 1.7E−05 | 32 | 18 |
| HMOX1 | TNFSF5 | 0.38 | 29 | 3 | 15 | 3 | 90.6% | 83.3% | 8.5E−05 | 0.0005 | 32 | 18 |
| DPP4 | HMOX1 | 0.38 | 28 | 4 | 16 | 2 | 87.5% | 88.9% | 0.0005 | 0.0001 | 32 | 18 |
| APAF1 | MNDA | 0.38 | 25 | 7 | 15 | 3 | 78.1% | 83.3% | 2.6E−06 | 3.2E−05 | 32 | 18 |
| NFKB1 | PLAUR | 0.38 | 27 | 5 | 15 | 3 | 84.4% | 83.3% | 5.5E−05 | 1.1E−06 | 32 | 18 |
| EGR1 | IL8 | 0.38 | 28 | 4 | 14 | 4 | 87.5% | 77.8% | 0.0003 | 0.0051 | 32 | 18 |
| DPP4 | IL18BP | 0.38 | 25 | 6 | 15 | 3 | 80.7% | 83.3% | 3.1E−06 | 0.0001 | 31 | 18 |
| HMOX1 | PLA2G7 | 0.37 | 26 | 6 | 15 | 3 | 81.3% | 83.3% | 4.0E−05 | 0.0006 | 32 | 18 |
| DPP4 | MHC2TA | 0.37 | 25 | 7 | 15 | 3 | 78.1% | 83.3% | 2.8E−05 | 0.0002 | 32 | 18 |
| EGR1 | LTA | 0.37 | 24 | 8 | 14 | 4 | 75.0% | 77.8% | 0.0003 | 0.0070 | 32 | 18 |
| MNDA | TXNRD1 | 0.37 | 26 | 6 | 15 | 3 | 81.3% | 83.3% | 7.0E−05 | 3.7E−06 | 32 | 18 |
| EGR1 | MHC2TA | 0.37 | 26 | 6 | 15 | 3 | 81.3% | 83.3% | 3.1E−05 | 0.0073 | 32 | 18 |
| PTPRC | TNF | 0.37 | 27 | 5 | 15 | 3 | 84.4% | 83.3% | 0.0010 | 3.1E−06 | 32 | 18 |
| LTA | PLAUR | 0.37 | 26 | 6 | 15 | 3 | 81.3% | 83.3% | 8.0E−05 | 0.0003 | 32 | 18 |
| EGR1 | PLAUR | 0.37 | 25 | 7 | 14 | 4 | 78.1% | 77.8% | 8.9E−05 | 0.0084 | 32 | 18 |
| TNF | TOSO | 0.36 | 25 | 6 | 14 | 4 | 80.7% | 77.8% | 1.9E−05 | 0.0012 | 31 | 18 |
| EGR1 | HMOX1 | 0.36 | 28 | 4 | 14 | 4 | 87.5% | 77.8% | 0.0010 | 0.0099 | 32 | 18 |
| HMOX1 | HSPA1A | 0.36 | 26 | 6 | 15 | 3 | 81.3% | 83.3% | 1.4E−06 | 0.0010 | 32 | 18 |
| IL1RN | TXNRD1 | 0.36 | 28 | 4 | 16 | 2 | 87.5% | 88.9% | 0.0001 | 3.5E−06 | 32 | 18 |
| CCR5 | CTLA4 | 0.36 | 26 | 6 | 14 | 4 | 81.3% | 77.8% | 5.4E−06 | 0.0001 | 32 | 18 |
| CCL5 | TXNRD1 | 0.35 | 25 | 7 | 15 | 3 | 78.1% | 83.3% | 0.0001 | 0.0022 | 32 | 18 |
| TLR2 | TXNRD1 | 0.35 | 25 | 7 | 15 | 3 | 78.1% | 83.3% | 0.0001 | 8.9E−06 | 32 | 18 |
| PLAUR | TLR4 | 0.35 | 25 | 7 | 14 | 4 | 78.1% | 77.8% | 6.2E−06 | 0.0001 | 32 | 18 |
| IRF1 | LTA | 0.35 | 24 | 8 | 14 | 4 | 75.0% | 77.8% | 0.0005 | 2.7E−05 | 32 | 18 |
| EGR1 | TLR2 | 0.35 | 27 | 5 | 14 | 4 | 84.4% | 77.8% | 1.0E−05 | 0.0144 | 32 | 18 |
| EGR1 | TXNRD1 | 0.35 | 26 | 6 | 14 | 4 | 81.3% | 77.8% | 0.0001 | 0.0148 | 32 | 18 |
| CASP3 | PLAUR | 0.35 | 24 | 8 | 14 | 4 | 75.0% | 77.8% | 0.0002 | 0.0002 | 32 | 18 |
| PTPRC | TGFB1 | 0.35 | 26 | 6 | 14 | 4 | 81.3% | 77.8% | 0.0010 | 6.0E−06 | 32 | 18 |
| TGFB1 | TOSO | 0.35 | 24 | 7 | 15 | 3 | 77.4% | 83.3% | 3.2E−05 | 0.0023 | 31 | 18 |
| SSI3 | TXNRD1 | 0.35 | 25 | 7 | 15 | 3 | 78.1% | 83.3% | 0.0002 | 2.0E−05 | 32 | 18 |
| CASP3 | HMOX1 | 0.35 | 29 | 3 | 15 | 3 | 90.6% | 83.3% | 0.0017 | 0.0002 | 32 | 18 |
| TNFRSF1A | TXNRD1 | 0.34 | 27 | 5 | 15 | 3 | 84.4% | 83.3% | 0.0002 | 2.8E−06 | 32 | 18 |
| CASP1 | CASP3 | 0.34 | 25 | 7 | 14 | 4 | 78.1% | 77.8% | 0.0003 | 1.9E−05 | 32 | 18 |
| MMP9 | TXNRD1 | 0.34 | 26 | 6 | 15 | 3 | 81.3% | 83.3% | 0.0002 | 4.5E−06 | 32 | 18 |
| IFI16 | IL8 | 0.34 | 27 | 5 | 15 | 3 | 84.4% | 83.3% | 0.0012 | 0.0002 | 32 | 18 |
| EGR1 | TNFSF5 | 0.33 | 24 | 8 | 14 | 4 | 75.0% | 77.8% | 0.0004 | 0.0274 | 32 | 18 |
| ADAM17 | PLAUR | 0.33 | 26 | 6 | 14 | 4 | 81.3% | 77.8% | 0.0003 | 2.8E−05 | 32 | 18 |
| CXCR3 | TNFSF5 | 0.33 | 25 | 7 | 14 | 4 | 78.1% | 77.8% | 0.0005 | 5.0E−06 | 32 | 18 |
| CXCR3 | DPP4 | 0.33 | 26 | 6 | 14 | 4 | 81.3% | 77.8% | 0.0006 | 5.1E−06 | 32 | 18 |
| TGFB1 | TNFRSF13 | 0.33 | 24 | 8 | 14 | 4 | 75.0% | 77.8% | 1.7E−05 | 0.0019 | 32 | 18 |
| EGR1 | IL10 | 0.33 | 26 | 6 | 15 | 3 | 81.3% | 83.3% | 0.0001 | 0.0312 | 32 | 18 |
| ICAM1 | LTA | 0.33 | 26 | 6 | 15 | 3 | 81.3% | 83.3% | 0.0011 | 7.0E−05 | 32 | 18 |
| IFI16 | LTA | 0.33 | 25 | 7 | 14 | 4 | 78.1% | 77.8% | 0.0012 | 0.0002 | 32 | 18 |
| IL1R1 | PLAUR | 0.32 | 25 | 7 | 14 | 4 | 78.1% | 77.8% | 0.0004 | 1.8E−05 | 32 | 18 |
| IL8 | TGFB1 | 0.32 | 27 | 5 | 15 | 3 | 84.4% | 83.3% | 0.0024 | 0.0018 | 32 | 18 |
| CCR5 | EGR1 | 0.32 | 25 | 7 | 14 | 4 | 78.1% | 77.8% | 0.0394 | 0.0003 | 32 | 18 |
| EGR1 | PTPRC | 0.32 | 24 | 8 | 14 | 4 | 75.0% | 77.8% | 1.4E−05 | 0.0409 | 32 | 18 |
| LTA | MHC2TA | 0.32 | 26 | 6 | 15 | 3 | 81.3% | 83.3% | 0.0002 | 0.0014 | 32 | 18 |
| HMOX1 | MYC | 0.32 | 26 | 6 | 15 | 3 | 81.3% | 83.3% | 1.1E−05 | 0.0038 | 32 | 18 |
| EGR1 | TNF | 0.32 | 25 | 7 | 14 | 4 | 78.1% | 77.8% | 0.0052 | 0.0431 | 32 | 18 |
| CCR5 | MIF | 0.32 | 25 | 7 | 14 | 4 | 78.1% | 77.8% | 1.4E−05 | 0.0004 | 32 | 18 |
| CASP3 | TGFB1 | 0.32 | 25 | 7 | 15 | 3 | 78.1% | 83.3% | 0.0028 | 0.0006 | 32 | 18 |
| CASP1 | EGR1 | 0.32 | 29 | 3 | 14 | 4 | 90.6% | 77.8% | 0.0455 | 3.9E−05 | 32 | 18 |
| CTLA4 | TGFB1 | 0.32 | 26 | 6 | 14 | 4 | 81.3% | 77.8% | 0.0029 | 1.9E−05 | 32 | 18 |
| ADAM17 | TGFB1 | 0.32 | 26 | 6 | 15 | 3 | 81.3% | 83.3% | 0.0030 | 4.6E−05 | 32 | 18 |
| IRF1 | TXNRD1 | 0.32 | 27 | 5 | 14 | 4 | 84.4% | 77.8% | 0.0004 | 7.9E−05 | 32 | 18 |
| HMOX1 | TNFRSF13 | 0.32 | 25 | 7 | 14 | 4 | 78.1% | 77.8% | 2.7E−05 | 0.0043 | 32 | 18 |
| PLA2G7 | PLAUR | 0.32 | 24 | 8 | 14 | 4 | 75.0% | 77.8% | 0.0005 | 0.0003 | 32 | 18 |
| TGFB1 | TLR4 | 0.32 | 26 | 6 | 14 | 4 | 81.3% | 77.8% | 2.2E−05 | 0.0033 | 32 | 18 |
| HMOX1 | IL1R1 | 0.32 | 28 | 4 | 15 | 3 | 87.5% | 83.3% | 2.5E−05 | 0.0049 | 32 | 18 |
| CASP3 | CCR5 | 0.32 | 26 | 6 | 14 | 4 | 81.3% | 77.8% | 0.0005 | 0.0007 | 32 | 18 |
| HMOX1 | IL18 | 0.32 | 27 | 5 | 14 | 4 | 84.4% | 77.8% | 4.7E−05 | 0.0049 | 32 | 18 |
| CASP3 | TLR2 | 0.31 | 25 | 7 | 14 | 4 | 78.1% | 77.8% | 3.4E−05 | 0.0007 | 32 | 18 |
| CCL5 | PTPRC | 0.31 | 27 | 5 | 15 | 3 | 84.4% | 83.3% | 1.9E−05 | 0.0092 | 32 | 18 |
| TNF | TNFRSF13 | 0.31 | 25 | 7 | 14 | 4 | 78.1% | 77.8% | 3.1E−05 | 0.0069 | 32 | 18 |
| APAF1 | TNF | 0.31 | 24 | 8 | 14 | 4 | 75.0% | 77.8% | 0.0072 | 0.0003 | 32 | 18 |
| HMOX1 | TLR4 | 0.31 | 26 | 6 | 15 | 3 | 81.3% | 83.3% | 2.5E−05 | 0.0054 | 32 | 18 |
| HMOX1 | TOSO | 0.31 | 27 | 4 | 16 | 2 | 87.1% | 88.9% | 0.0001 | 0.0056 | 31 | 18 |
| DPP4 | IFI16 | 0.31 | 25 | 7 | 15 | 3 | 78.1% | 83.3% | 0.0004 | 0.0013 | 32 | 18 |
| CXCR3 | TOSO | 0.31 | 25 | 6 | 15 | 3 | 80.7% | 83.3% | 0.0001 | 1.4E−05 | 31 | 18 |
| APAF1 | ICAM1 | 0.31 | 25 | 7 | 14 | 4 | 78.1% | 77.8% | 0.0001 | 0.0004 | 32 | 18 |
| APAF1 | CCR5 | 0.31 | 26 | 6 | 14 | 4 | 81.3% | 77.8% | 0.0006 | 0.0004 | 32 | 18 |
| NFKB1 | TNF | 0.31 | 24 | 8 | 14 | 4 | 75.0% | 77.8% | 0.0093 | 1.4E−05 | 32 | 18 |
| IL8 | LTA | 0.31 | 26 | 6 | 14 | 4 | 81.3% | 77.8% | 0.0026 | 0.0036 | 32 | 18 |
| CASP3 | IL10 | 0.30 | 26 | 6 | 14 | 4 | 81.3% | 77.8% | 0.0003 | 0.0010 | 32 | 18 |
| PLA2G7 | TNF | 0.30 | 25 | 7 | 14 | 4 | 78.1% | 77.8% | 0.0104 | 0.0004 | 32 | 18 |
| IL1B | TXNRD1 | 0.30 | 28 | 4 | 16 | 2 | 87.5% | 88.9% | 0.0008 | 2.1E−05 | 32 | 18 |
| HMOX1 | IL8 | 0.30 | 25 | 7 | 15 | 3 | 78.1% | 83.3% | 0.0043 | 0.0083 | 32 | 18 |
| CCR5 | PLA2G7 | 0.30 | 24 | 8 | 14 | 4 | 75.0% | 77.8% | 0.0005 | 0.0008 | 32 | 18 |
| CD8A | LTA | 0.30 | 24 | 8 | 14 | 4 | 75.0% | 77.8% | 0.0032 | 2.0E−05 | 32 | 18 |
| CCL5 | CD4 | 0.30 | 27 | 5 | 14 | 4 | 84.4% | 77.8% | 1.4E−05 | 0.0165 | 32 | 18 |
| MYC | TGFB1 | 0.30 | 25 | 7 | 14 | 4 | 78.1% | 77.8% | 0.0063 | 2.6E−05 | 32 | 18 |
| CASP3 | TNF | 0.30 | 24 | 8 | 14 | 4 | 75.0% | 77.8% | 0.0127 | 0.0013 | 32 | 18 |
| CTLA4 | IL32 | 0.30 | 26 | 6 | 14 | 4 | 81.3% | 77.8% | 0.0002 | 4.3E−05 | 32 | 18 |
| IFI16 | TXNRD1 | 0.30 | 24 | 8 | 14 | 4 | 75.0% | 77.8% | 0.0009 | 0.0007 | 32 | 18 |
| CD8A | DPP4 | 0.30 | 24 | 8 | 14 | 4 | 75.0% | 77.8% | 0.0022 | 2.2E−05 | 32 | 18 |
| IL10 | TXNRD1 | 0.29 | 26 | 6 | 14 | 4 | 81.3% | 77.8% | 0.0010 | 0.0005 | 32 | 18 |
| HMOX1 | MIF | 0.29 | 26 | 6 | 15 | 3 | 81.3% | 83.3% | 3.6E−05 | 0.0108 | 32 | 18 |
| IL8 | PLAUR | 0.29 | 28 | 4 | 16 | 2 | 87.5% | 88.9% | 0.0011 | 0.0058 | 32 | 18 |
| PLAUR | TNFSF5 | 0.29 | 26 | 6 | 14 | 4 | 81.3% | 77.8% | 0.0019 | 0.0011 | 32 | 18 |
| CASP1 | TLR4 | 0.29 | 25 | 7 | 14 | 4 | 78.1% | 77.8% | 5.5E−05 | 0.0001 | 32 | 18 |
| PLA2G7 | TGFB1 | 0.29 | 24 | 8 | 14 | 4 | 75.0% | 77.8% | 0.0085 | 0.0007 | 32 | 18 |
| IFI16 | TNFSF5 | 0.29 | 27 | 5 | 14 | 4 | 84.4% | 77.8% | 0.0021 | 0.0009 | 32 | 18 |
| CCL5 | PLAUR | 0.29 | 25 | 7 | 14 | 4 | 78.1% | 77.8% | 0.0014 | 0.0250 | 32 | 18 |
| CCR5 | PTPRC | 0.29 | 28 | 4 | 14 | 4 | 87.5% | 77.8% | 5.3E−05 | 0.0013 | 32 | 18 |
| CASP3 | LTA | 0.28 | 25 | 7 | 14 | 4 | 78.1% | 77.8% | 0.0056 | 0.0021 | 32 | 18 |
| CASP3 | CCL5 | 0.28 | 26 | 6 | 14 | 4 | 81.3% | 77.8% | 0.0285 | 0.0022 | 32 | 18 |
| HMOX1 | PTGS2 | 0.28 | 26 | 6 | 15 | 3 | 81.3% | 83.3% | 4.4E−05 | 0.0162 | 32 | 18 |
| DPP4 | IRF1 | 0.28 | 25 | 7 | 14 | 4 | 78.1% | 77.8% | 0.0003 | 0.0037 | 32 | 18 |
| CCL5 | TNFRSF13 | 0.28 | 25 | 7 | 14 | 4 | 78.1% | 77.8% | 9.5E−05 | 0.0307 | 32 | 18 |
| DPP4 | PLAUR | 0.28 | 25 | 7 | 14 | 4 | 78.1% | 77.8% | 0.0017 | 0.0039 | 32 | 18 |
| CD19 | MHC2TA | 0.28 | 26 | 6 | 15 | 3 | 81.3% | 83.3% | 0.0007 | 5.9E−05 | 32 | 18 |
| IL8 | IRF1 | 0.28 | 26 | 6 | 14 | 4 | 81.3% | 77.8% | 0.0003 | 0.0091 | 32 | 18 |
| CCL5 | MIF | 0.28 | 25 | 7 | 14 | 4 | 78.1% | 77.8% | 6.2E−05 | 0.0363 | 32 | 18 |
| CASP1 | IL15 | 0.28 | 25 | 7 | 15 | 3 | 78.1% | 83.3% | 7.9E−05 | 0.0002 | 32 | 18 |
| CASP1 | IL18 | 0.28 | 24 | 8 | 14 | 4 | 75.0% | 77.8% | 0.0002 | 0.0002 | 32 | 18 |
| CCL5 | IL8 | 0.27 | 26 | 6 | 14 | 4 | 81.3% | 77.8% | 0.0110 | 0.0401 | 32 | 18 |
| CCL5 | NFKB1 | 0.27 | 24 | 8 | 14 | 4 | 75.0% | 77.8% | 4.1E−05 | 0.0411 | 32 | 18 |
| CCR5 | TNFRSF13 | 0.27 | 25 | 7 | 14 | 4 | 78.1% | 77.8% | 0.0001 | 0.0020 | 32 | 18 |
| CCL5 | HMOX1 | 0.27 | 25 | 7 | 14 | 4 | 78.1% | 77.8% | 0.0230 | 0.0428 | 32 | 18 |
| APAF1 | IL10 | 0.27 | 26 | 6 | 15 | 3 | 81.3% | 83.3% | 0.0010 | 0.0013 | 32 | 18 |
| HSPA1A | PLAUR | 0.27 | 27 | 5 | 15 | 3 | 84.4% | 83.3% | 0.0023 | 2.6E−05 | 32 | 18 |
| IL8 | TNF | 0.27 | 24 | 8 | 14 | 4 | 75.0% | 77.8% | 0.0317 | 0.0118 | 32 | 18 |
| CCL5 | SSI3 | 0.27 | 26 | 6 | 15 | 3 | 81.3% | 83.3% | 0.0003 | 0.0437 | 32 | 18 |
| IL8 | MHC2TA | 0.27 | 26 | 6 | 15 | 3 | 81.3% | 83.3% | 0.0009 | 0.0120 | 32 | 18 |
| APAF1 | TIMP1 | 0.27 | 24 | 8 | 14 | 4 | 75.0% | 77.8% | 0.0001 | 0.0014 | 32 | 18 |
| IL1R1 | TGFB1 | 0.27 | 24 | 8 | 14 | 4 | 75.0% | 77.8% | 0.0167 | 0.0001 | 32 | 18 |
| HMOX1 | IL15 | 0.27 | 28 | 4 | 15 | 3 | 87.5% | 83.3% | 9.6E−05 | 0.0251 | 32 | 18 |
| IL10 | PLA2G7 | 0.27 | 27 | 5 | 15 | 3 | 84.4% | 83.3% | 0.0014 | 0.0011 | 32 | 18 |
| CCL5 | IFI16 | 0.27 | 27 | 5 | 15 | 3 | 84.4% | 83.3% | 0.0018 | 0.0495 | 32 | 18 |
| CCL5 | CTLA4 | 0.27 | 27 | 5 | 15 | 3 | 84.4% | 83.3% | 0.0001 | 0.0498 | 32 | 18 |
| CCR5 | CD19 | 0.27 | 25 | 7 | 14 | 4 | 78.1% | 77.8% | 8.7E−05 | 0.0024 | 32 | 18 |
| IL8 | PLA2G7 | 0.27 | 24 | 8 | 14 | 4 | 75.0% | 77.8% | 0.0015 | 0.0137 | 32 | 18 |
| IL23A | TGFB1 | 0.27 | 24 | 8 | 14 | 4 | 75.0% | 77.8% | 0.0186 | 7.2E−05 | 32 | 18 |
| PTPRC | TIMP1 | 0.27 | 24 | 8 | 14 | 4 | 75.0% | 77.8% | 0.0002 | 9.7E−05 | 32 | 18 |
| ADAM17 | TLR2 | 0.27 | 25 | 7 | 14 | 4 | 78.1% | 77.8% | 0.0002 | 0.0003 | 32 | 18 |
| ICAM1 | NFKB1 | 0.27 | 26 | 6 | 15 | 3 | 81.3% | 83.3% | 5.5E−05 | 0.0006 | 32 | 18 |
| CXCL1 | HMOX1 | 0.26 | 24 | 8 | 14 | 4 | 75.0% | 77.8% | 0.0318 | 4.5E−05 | 32 | 18 |
| GZMB | LTA | 0.26 | 26 | 6 | 14 | 4 | 81.3% | 77.8% | 0.0114 | 9.3E−05 | 32 | 18 |
| CCR5 | IL8 | 0.26 | 27 | 5 | 14 | 4 | 84.4% | 77.8% | 0.0169 | 0.0029 | 32 | 18 |
| TLR2 | TLR4 | 0.26 | 25 | 7 | 14 | 4 | 78.1% | 77.8% | 0.0001 | 0.0002 | 32 | 18 |
| DPP4 | ICAM1 | 0.26 | 25 | 7 | 14 | 4 | 78.1% | 77.8% | 0.0008 | 0.0082 | 32 | 18 |
| HMOX1 | SERPINA1 | 0.26 | 25 | 7 | 14 | 4 | 78.1% | 77.8% | 6.5E−05 | 0.0411 | 32 | 18 |
| CASP1 | IL8 | 0.26 | 25 | 7 | 14 | 4 | 78.1% | 77.8% | 0.0214 | 0.0004 | 32 | 18 |
| MHC2TA | TXNRD1 | 0.26 | 27 | 5 | 15 | 3 | 84.4% | 83.3% | 0.0037 | 0.0015 | 32 | 18 |
| HLADRA | LTA | 0.26 | 26 | 6 | 15 | 3 | 81.3% | 83.3% | 0.0154 | 0.0003 | 32 | 18 |
| IL32 | MIF | 0.26 | 27 | 5 | 14 | 4 | 84.4% | 77.8% | 0.0001 | 0.0007 | 32 | 18 |
| HMOX1 | TNFRSF1A | 0.25 | 26 | 6 | 15 | 3 | 81.3% | 83.3% | 5.9E−05 | 0.0485 | 32 | 18 |
| HLADRA | IL8 | 0.25 | 24 | 8 | 14 | 4 | 75.0% | 77.8% | 0.0244 | 0.0003 | 32 | 18 |
| IL8 | TXNRD1 | 0.25 | 25 | 7 | 14 | 4 | 78.1% | 77.8% | 0.0042 | 0.0251 | 32 | 18 |
| IL32 | TXNRD1 | 0.25 | 25 | 7 | 15 | 3 | 78.1% | 83.3% | 0.0043 | 0.0008 | 32 | 18 |
| CD4 | PLAUR | 0.25 | 24 | 8 | 14 | 4 | 75.0% | 77.8% | 0.0050 | 7.4E−05 | 32 | 18 |
| CD19 | TGFB1 | 0.25 | 24 | 8 | 14 | 4 | 75.0% | 77.8% | 0.0374 | 0.0002 | 32 | 18 |
| DPP4 | IL10 | 0.25 | 26 | 6 | 14 | 4 | 81.3% | 77.8% | 0.0025 | 0.0134 | 32 | 18 |
| ADAM17 | IRF1 | 0.25 | 24 | 8 | 15 | 3 | 75.0% | 83.3% | 0.0010 | 0.0006 | 32 | 18 |
| IL8 | MNDA | 0.25 | 26 | 6 | 15 | 3 | 81.3% | 83.3% | 0.0003 | 0.0332 | 32 | 18 |
| ADAM17 | IL10 | 0.24 | 24 | 8 | 14 | 4 | 75.0% | 77.8% | 0.0026 | 0.0006 | 32 | 18 |
| IL32 | IL8 | 0.24 | 28 | 4 | 15 | 3 | 87.5% | 83.3% | 0.0337 | 0.0011 | 32 | 18 |
| IL8 | TLR2 | 0.24 | 27 | 5 | 15 | 3 | 84.4% | 83.3% | 0.0004 | 0.0388 | 32 | 18 |
| ICAM1 | TLR4 | 0.24 | 26 | 6 | 14 | 4 | 81.3% | 77.8% | 0.0003 | 0.0015 | 32 | 18 |
| CD8A | TOSO | 0.24 | 24 | 7 | 14 | 4 | 77.4% | 77.8% | 0.0013 | 0.0002 | 31 | 18 |
| ICAM1 | IL8 | 0.24 | 27 | 5 | 15 | 3 | 84.4% | 83.3% | 0.0430 | 0.0016 | 32 | 18 |
| CCL3 | IL8 | 0.24 | 24 | 7 | 14 | 4 | 77.4% | 77.8% | 0.0356 | 0.0006 | 31 | 18 |
| CASP1 | LTA | 0.24 | 24 | 8 | 14 | 4 | 75.0% | 77.8% | 0.0320 | 0.0007 | 32 | 18 |
| IL10 | IL1R1 | 0.23 | 24 | 8 | 14 | 4 | 75.0% | 77.8% | 0.0004 | 0.0038 | 32 | 18 |
| IFNG | IL8 | 0.23 | 25 | 7 | 14 | 4 | 78.1% | 77.8% | 0.0500 | 0.0002 | 32 | 18 |
| PLAUR | TNFRSF1A | 0.23 | 24 | 8 | 14 | 4 | 75.0% | 77.8% | 0.0001 | 0.0093 | 32 | 18 |
| DPP4 | TLR2 | 0.23 | 24 | 8 | 14 | 4 | 75.0% | 77.8% | 0.0006 | 0.0220 | 32 | 18 |
| LTA | MNDA | 0.23 | 25 | 7 | 14 | 4 | 78.1% | 77.8% | 0.0004 | 0.0405 | 32 | 18 |
| HLADRA | TNFSF5 | 0.23 | 25 | 7 | 14 | 4 | 78.1% | 77.8% | 0.0177 | 0.0007 | 32 | 18 |
| TLR2 | TNFSF5 | 0.23 | 25 | 7 | 14 | 4 | 78.1% | 77.8% | 0.0182 | 0.0007 | 32 | 18 |
| CTLA4 | MHC2TA | 0.23 | 25 | 7 | 14 | 4 | 78.1% | 77.8% | 0.0041 | 0.0004 | 32 | 18 |
| TIMP1 | TNFSF5 | 0.23 | 25 | 7 | 14 | 4 | 78.1% | 77.8% | 0.0208 | 0.0007 | 32 | 18 |
| IL18BP | TXNRD1 | 0.22 | 24 | 7 | 14 | 4 | 77.4% | 77.8% | 0.0088 | 0.0006 | 31 | 18 |
| DPP4 | GZMB | 0.22 | 24 | 8 | 14 | 4 | 75.0% | 77.8% | 0.0004 | 0.0348 | 32 | 18 |
| HSPA1A | TXNRD1 | 0.22 | 24 | 8 | 14 | 4 | 75.0% | 77.8% | 0.0136 | 0.0002 | 32 | 18 |
| CASP3 | TNFSF6 | 0.22 | 24 | 8 | 14 | 4 | 75.0% | 77.8% | 0.0003 | 0.0223 | 32 | 18 |
| IL10 | TLR4 | 0.22 | 27 | 5 | 15 | 3 | 84.4% | 83.3% | 0.0007 | 0.0071 | 32 | 18 |
| IL10 | PTPRC | 0.21 | 25 | 7 | 14 | 4 | 78.1% | 77.8% | 0.0006 | 0.0083 | 32 | 18 |
| PTGS2 | TLR2 | 0.20 | 25 | 7 | 14 | 4 | 78.1% | 77.8% | 0.0018 | 0.0008 | 32 | 18 |
| ICAM1 | PTGS2 | 0.20 | 24 | 8 | 14 | 4 | 75.0% | 77.8% | 0.0008 | 0.0065 | 32 | 18 |
| CCR5 | IFI16 | 0.20 | 25 | 7 | 14 | 4 | 78.1% | 77.8% | 0.0233 | 0.0304 | 32 | 18 |
| MIF | PLAUR | 0.19 | 25 | 7 | 14 | 4 | 78.1% | 77.8% | 0.0396 | 0.0011 | 32 | 18 |
| ADAM17 | MHC2TA | 0.19 | 24 | 8 | 14 | 4 | 75.0% | 77.8% | 0.0154 | 0.0038 | 32 | 18 |
| CD8A | TXNRD1 | 0.19 | 24 | 8 | 14 | 4 | 75.0% | 77.8% | 0.0419 | 0.0009 | 32 | 18 |
| IL1R1 | IRF1 | 0.19 | 24 | 8 | 14 | 4 | 75.0% | 77.8% | 0.0078 | 0.0021 | 32 | 18 |
| APAF1 | CD86 | 0.19 | 26 | 6 | 15 | 3 | 81.3% | 83.3% | 0.0005 | 0.0294 | 32 | 18 |
| ICAM1 | MYC | 0.17 | 24 | 8 | 14 | 4 | 75.0% | 77.8% | 0.0024 | 0.0211 | 32 | 18 |
| IL32 | TNFRSF13 | 0.17 | 24 | 8 | 14 | 4 | 75.0% | 77.8% | 0.0057 | 0.0186 | 32 | 18 |
| MMP9 | TLR4 | 0.16 | 25 | 7 | 14 | 4 | 78.1% | 77.8% | 0.0055 | 0.0025 | 32 | 18 |
| HSPA1A | IRF1 | 0.16 | 25 | 7 | 14 | 4 | 78.1% | 77.8% | 0.0243 | 0.0014 | 32 | 18 |
| TIMP1 | TOSO | 0.16 | 24 | 7 | 14 | 4 | 77.4% | 77.8% | 0.0264 | 0.0128 | 31 | 18 |
| IL18 | SSI3 | 0.15 | 24 | 8 | 14 | 4 | 75.0% | 77.8% | 0.0177 | 0.0135 | 32 | 18 |
| ALOX5 | TLR4 | 0.15 | 24 | 8 | 14 | 4 | 75.0% | 77.8% | 0.0075 | 0.0028 | 32 | 18 |
| HLADRA | IL15 | 0.12 | 24 | 8 | 14 | 4 | 75.0% | 77.8% | 0.0211 | 0.0424 | 32 | 18 |

TABLE 2B

| | Colon | Normals | Sum |
|---|---|---|---|
| Group Size | 36.0% | 64.0% | 100% |
| N = | 18 | 32 | 50 |

| Gene | Mean | Mean | p-val |
|---|---|---|---|
| C1QA | 19.1 | 20.9 | 4.9E−08 |
| EGR1 | 18.7 | 19.7 | 3.9E−05 |
| CCL5 | 11.6 | 12.2 | 0.0002 |
| TNF | 18.2 | 18.7 | 0.0003 |
| HMOX1 | 16.0 | 16.6 | 0.0004 |
| TGFB1 | 12.3 | 12.8 | 0.0005 |
| IL8 | 22.3 | 21.3 | 0.0007 |
| LTA | 20.4 | 19.9 | 0.0010 |
| DPP4 | 19.0 | 18.4 | 0.0016 |
| TNFSF5 | 18.1 | 17.5 | 0.0021 |
| CASP3 | 20.2 | 19.8 | 0.0025 |
| PLAUR | 14.6 | 15.0 | 0.0036 |
| CCR5 | 17.2 | 17.7 | 0.0039 |
| TXNRD1 | 17.3 | 16.8 | 0.0039 |
| IFI16 | 15.2 | 16.0 | 0.0050 |
| APAF1 | 17.2 | 16.7 | 0.0062 |
| PLA2G7 | 19.7 | 19.0 | 0.0064 |
| IL10 | 22.9 | 23.7 | 0.0084 |
| MHC2TA | 15.8 | 16.1 | 0.0095 |
| ICAM1 | 16.8 | 17.2 | 0.0175 |
| IL32 | 13.3 | 13.7 | 0.0216 |
| IRF1 | 12.5 | 12.8 | 0.0219 |
| TOSO | 15.9 | 15.5 | 0.0241 |
| SSI3 | 17.2 | 17.7 | 0.0343 |
| ADAM17 | 18.7 | 18.4 | 0.0396 |
| CASP1 | 15.6 | 15.9 | 0.0454 |
| IL18 | 21.8 | 21.4 | 0.0457 |
| HLADRA | 12.0 | 12.2 | 0.0551 |
| CCL3 | 19.8 | 20.2 | 0.0649 |
| TLR2 | 15.8 | 16.1 | 0.0657 |
| TIMP1 | 14.1 | 14.4 | 0.0726 |
| TNFRSF13B | 20.1 | 19.7 | 0.0752 |
| IL1R1 | 20.6 | 20.2 | 0.0918 |
| MNDA | 12.4 | 12.7 | 0.1000 |
| TLR4 | 15.1 | 14.8 | 0.1036 |
| CTLA4 | 19.4 | 19.1 | 0.1046 |
| IL18BP | 16.7 | 17.0 | 0.1125 |
| IL15 | 21.4 | 21.0 | 0.1153 |
| PTPRC | 11.8 | 11.6 | 0.1310 |
| CD19 | 19.2 | 18.9 | 0.1402 |
| MIF | 15.5 | 15.3 | 0.1497 |
| GZMB | 15.9 | 16.4 | 0.1570 |
| IL1RN | 16.1 | 16.3 | 0.1705 |
| IL23A | 21.5 | 21.3 | 0.1820 |
| MYC | 18.2 | 18.0 | 0.1840 |
| PTGS2 | 17.1 | 16.8 | 0.1845 |
| IL1B | 15.6 | 15.9 | 0.2112 |
| TNFSF6 | 19.8 | 20.0 | 0.2370 |
| CD8A | 15.3 | 15.6 | 0.2424 |
| IFNG | 22.8 | 23.1 | 0.2554 |
| MMP9 | 14.1 | 14.5 | 0.2737 |
| NFKB1 | 16.8 | 16.7 | 0.2991 |
| SERPINA1 | 12.5 | 12.7 | 0.3440 |
| IL5 | 21.7 | 21.5 | 0.3448 |
| CXCR3 | 17.2 | 17.4 | 0.3481 |
| ALOX5 | 16.0 | 16.1 | 0.3599 |
| CD4 | 15.3 | 15.2 | 0.4102 |
| CXCL1 | 19.2 | 19.0 | 0.4253 |
| CCR3 | 16.6 | 16.5 | 0.4941 |
| TNFRSF1A | 14.8 | 14.9 | 0.5094 |
| SERPINE1 | 20.5 | 20.6 | 0.5422 |
| CD86 | 17.9 | 17.9 | 0.5875 |
| MAPK14 | 14.8 | 14.9 | 0.5938 |
| ELA2 | 20.7 | 20.9 | 0.6264 |
| VEGF | 23.2 | 23.3 | 0.7141 |
| HSPA1A | 14.4 | 14.3 | 0.7476 |
| MMP12 | 23.3 | 23.1 | 0.7872 |
| HMGB1 | 16.9 | 16.9 | 0.9920 |

TABLE 2C

| | | | | | | Pre- |
|---|---|---|---|---|---|---|
| | | | | | | dicted |
| | | | | | | pro- |
| | | | | | | bability |
| | | | | | | of |
| | | | | | | Colon |
| Patient ID | Group | HMOX1 | TXNRD1 | logit | odds | Inf |
| CC-019 | Colon | 16.02 | 18.00 | 8.34 | 4194.09 | 0.9998 |
| CC-020 | Colon | 15.13 | 17.16 | 7.92 | 2748.70 | 0.9996 |
| CC-003 | Colon | 16.03 | 17.77 | 6.62 | 747.28 | 0.9987 |
| CC-014 | Colon | 15.84 | 17.50 | 5.82 | 336.20 | 0.9970 |
| CC-004 | Colon | 16.20 | 17.59 | 4.26 | 71.14 | 0.9861 |
| CC-018 | Colon | 15.49 | 16.95 | 4.15 | 63.21 | 0.9844 |
| CC-002 | Colon | 15.68 | 17.04 | 3.58 | 35.72 | 0.9728 |
| CC-005 | Colon | 16.59 | 17.79 | 3.16 | 23.58 | 0.9593 |
| CC-011 | Colon | 15.12 | 16.48 | 3.06 | 21.39 | 0.9553 |
| CC-007 | Colon | 16.46 | 17.60 | 2.63 | 13.87 | 0.9327 |
| CC-006 | Colon | 16.22 | 17.38 | 2.54 | 12.71 | 0.9271 |
| CC-012 | Colon | 16.05 | 17.16 | 2.05 | 7.74 | 0.8856 |
| CC-008 | Colon | 16.07 | 17.17 | 2.03 | 7.65 | 0.8844 |
| CC-009 | Colon | 16.47 | 17.45 | 1.45 | 4.28 | 0.8107 |
| HN-003 | Normals | 15.71 | 16.69 | 0.88 | 2.42 | 0.7073 |
| CC-001 | Colon | 15.06 | 16.11 | 0.82 | 2.26 | 0.6933 |
| CC-013 | Colon | 16.93 | 17.70 | 0.37 | 1.44 | 0.5905 |
| HN-001 | Normals | 16.73 | 17.49 | 0.14 | 1.15 | 0.5353 |
| CC-015 | Colon | 16.57 | 17.33 | 0.01 | 1.01 | 0.5031 |
| HN-020 | Normals | 16.11 | 16.82 | −0.72 | 0.49 | 0.3267 |
| HN-016 | Normals | 16.94 | 17.51 | −1.10 | 0.33 | 0.2494 |
| HN-010 | Normals | 16.62 | 17.21 | −1.15 | 0.32 | 0.2397 |
| HN-011 | Normals | 16.57 | 17.10 | −1.65 | 0.19 | 0.1617 |
| HN-004 | Normals | 15.07 | 15.77 | −1.65 | 0.19 | 0.1615 |
| HN-029 | Normals | 16.92 | 17.35 | −2.14 | 0.12 | 0.1052 |
| HN-022 | Normals | 17.98 | 18.19 | −2.84 | 0.06 | 0.0550 |
| HN-023 | Normals | 16.44 | 16.80 | −3.03 | 0.05 | 0.0462 |
| HN-032 | Normals | 16.47 | 16.80 | −3.19 | 0.04 | 0.0394 |
| HN-028 | Normals | 16.47 | 16.78 | −3.34 | 0.04 | 0.0342 |
| HN-027 | Normals | 16.76 | 17.02 | −3.46 | 0.03 | 0.0305 |
| HN-021 | Normals | 16.39 | 16.68 | −3.53 | 0.03 | 0.0286 |
| HN-026 | Normals | 16.41 | 16.69 | −3.62 | 0.03 | 0.0260 |
| HN-019 | Normals | 16.49 | 16.75 | −3.65 | 0.03 | 0.0253 |
| HN-018 | Normals | 16.25 | 16.52 | −3.82 | 0.02 | 0.0215 |
| HN-017 | Normals | 16.95 | 17.12 | −3.98 | 0.02 | 0.0183 |
| HN-031 | Normals | 16.79 | 16.95 | −4.14 | 0.02 | 0.0157 |
| HN-014 | Normals | 16.26 | 16.48 | −4.17 | 0.02 | 0.0152 |
| HN-009 | Normals | 16.59 | 16.75 | −4.38 | 0.01 | 0.0124 |
| HN-012 | Normals | 16.63 | 16.77 | −4.39 | 0.01 | 0.0123 |
| CC-010 | Colon | 16.46 | 16.61 | −4.47 | 0.01 | 0.0114 |
| HN-015 | Normals | 16.87 | 16.96 | −4.61 | 0.01 | 0.0099 |
| HN-007 | Normals | 16.29 | 16.44 | −4.67 | 0.01 | 0.0093 |
| HN-024 | Normals | 17.19 | 17.23 | −4.69 | 0.01 | 0.0091 |
| HN-002 | Normals | 17.18 | 17.21 | −4.80 | 0.01 | 0.0082 |
| HN-030 | Normals | 17.42 | 17.29 | −5.72 | 0.00 | 0.0033 |
| HN-006 | Normals | 16.94 | 16.82 | −6.07 | 0.00 | 0.0023 |
| HN-008 | Normals | 15.87 | 15.79 | −6.61 | 0.00 | 0.0013 |
| HN-005 | Normals | 16.50 | 16.24 | −7.45 | 0.00 | 0.0006 |
| HN-013 | Normals | 16.66 | 16.32 | −7.89 | 0.00 | 0.0004 |
| HN-025 | Normals | 17.06 | 16.53 | −8.91 | 0.00 | 0.0001 |

TABLE 3A

| | | | | | | | | | | | total used | |
|---|---|---|---|---|---|---|---|---|---|---|---|---|
| | | | | | | | Normal | Colon | | | (excludes | |
| | | En- | | | | N = | 50 | 23 | | | missing) | |
| 2-gene models and | | tropy | #normal | #normal | #cc | #cc | Correct | Correct | | | # | # |
| 1-gene models | | R-sq | Correct | FALSE | Correct | FALSE | Classification | Classification | p-val 1 | p-val 2 | normals | disease |
| ATM | CDKN2A | 0.64 | 44 | 6 | 21 | 2 | 88.0% | 91.3% | 4.2E−07 | 2.8E−08 | 50 | 23 |
| CDK4 | CDKN2A | 0.62 | 47 | 3 | 21 | 2 | 94.0% | 91.3% | 1.1E−06 | 2.2E−13 | 50 | 23 |
| CDKN2A | ITGB1 | 0.62 | 47 | 3 | 21 | 2 | 94.0% | 91.3% | 7.0E−12 | 1.2E−06 | 50 | 23 |
| CDKN2A | TNFRSF10A | 0.62 | 46 | 4 | 20 | 3 | 92.0% | 87.0% | 1.9E−11 | 1.3E−06 | 50 | 23 |
| RHOC | SMAD4 | 0.58 | 44 | 6 | 20 | 3 | 88.0% | 87.0% | 1.3E−09 | 1.6E−07 | 50 | 23 |
| ATM | GZMA | 0.58 | 43 | 7 | 20 | 3 | 86.0% | 87.0% | 8.3E−11 | 5.0E−07 | 50 | 23 |
| CDK4 | RHOC | 0.56 | 43 | 7 | 20 | 3 | 86.0% | 87.0% | 4.3E−07 | 3.7E−12 | 50 | 23 |
| ATM | RHOC | 0.56 | 43 | 7 | 20 | 3 | 86.0% | 87.0% | 5.1E−07 | 1.5E−06 | 50 | 23 |
| CDKN2A | ITGAE | 0.56 | 45 | 5 | 21 | 2 | 90.0% | 91.3% | 1.5E−09 | 2.5E−05 | 50 | 23 |
| CDKN2A | MSH2 | 0.56 | 42 | 8 | 20 | 3 | 84.0% | 87.0% | 5.4E−07 | 2.6E−05 | 50 | 23 |
| EGR1 | NME4 | 0.54 | 44 | 6 | 20 | 3 | 88.0% | 87.0% | 2.6E−11 | 1.7E−07 | 50 | 23 |
| RHOC | VHL | 0.54 | 47 | 3 | 21 | 2 | 94.0% | 91.3% | 1.1E−11 | 1.4E−06 | 50 | 23 |
| CDKN2A | ITGA3 | 0.54 | 42 | 7 | 19 | 4 | 85.7% | 82.6% | 7.8E−12 | 8.1E−05 | 49 | 23 |
| ITGAE | RHOC | 0.54 | 43 | 7 | 20 | 3 | 86.0% | 87.0% | 1.5E−06 | 4.1E−09 | 50 | 23 |
| BCL2 | CDKN2A | 0.53 | 46 | 4 | 20 | 3 | 92.0% | 87.0% | 9.6E−05 | 1.8E−11 | 50 | 23 |
| CDKN2A | SMAD4 | 0.52 | 44 | 6 | 20 | 3 | 88.0% | 87.0% | 2.4E−08 | 0.0002 | 50 | 23 |
| SMAD4 | TNF | 0.52 | 42 | 8 | 20 | 3 | 84.0% | 87.0% | 1.8E−07 | 2.6E−08 | 50 | 23 |
| CDKN2A | PTCH1 | 0.51 | 43 | 7 | 20 | 3 | 86.0% | 87.0% | 1.3E−11 | 0.0002 | 50 | 23 |
| ATM | TNF | 0.51 | 44 | 6 | 20 | 3 | 88.0% | 87.0% | 2.4E−07 | 1.3E−05 | 50 | 23 |
| CDKN2A | COL18A1 | 0.51 | 45 | 5 | 20 | 3 | 90.0% | 87.0% | 2.3E−11 | 0.0002 | 50 | 23 |
| BCL2 | RHOC | 0.50 | 40 | 10 | 20 | 3 | 80.0% | 87.0% | 6.5E−06 | 5.6E−11 | 50 | 23 |
| ATM | NRAS | 0.50 | 45 | 5 | 19 | 4 | 90.0% | 82.6% | 1.5E−10 | 2.2E−05 | 50 | 23 |
| CDKN2A | ERBB2 | 0.50 | 41 | 9 | 19 | 4 | 82.0% | 82.6% | 4.7E−11 | 0.0004 | 50 | 23 |
| NRAS | SMAD4 | 0.50 | 43 | 7 | 20 | 3 | 86.0% | 87.0% | 6.9E−08 | 1.8E−10 | 50 | 23 |
| CDKN2A | HRAS | 0.49 | 41 | 9 | 19 | 4 | 82.0% | 82.6% | 4.0E−11 | 0.0007 | 50 | 23 |
| RHOC | TNFRSF10A | 0.48 | 40 | 10 | 18 | 5 | 80.0% | 78.3% | 1.0E−08 | 1.7E−05 | 50 | 23 |
| MSH2 | RHOC | 0.48 | 43 | 7 | 20 | 3 | 86.0% | 87.0% | 2.1E−05 | 2.0E−05 | 50 | 23 |
| CDKN2A | SKIL | 0.48 | 43 | 7 | 20 | 3 | 86.0% | 87.0% | 5.9E−07 | 0.0011 | 50 | 23 |
| ATM | PCNA | 0.48 | 44 | 6 | 20 | 3 | 88.0% | 87.0% | 4.2E−11 | 7.0E−05 | 50 | 23 |
| NFKB1 | RHOC | 0.47 | 42 | 8 | 20 | 3 | 84.0% | 87.0% | 3.7E−05 | 1.5E−10 | 50 | 23 |
| RHOC | TP53 | 0.47 | 42 | 8 | 20 | 3 | 84.0% | 87.0% | 7.7E−11 | 4.0E−05 | 50 | 23 |
| CDKN2A | SKI | 0.47 | 40 | 10 | 19 | 4 | 80.0% | 82.6% | 4.2E−10 | 0.0021 | 50 | 23 |
| CDKN2A | EGR1 | 0.46 | 39 | 11 | 19 | 4 | 78.0% | 82.6% | 6.5E−06 | 0.0024 | 50 | 23 |
| CDKN2A | IFITM1 | 0.46 | 42 | 8 | 20 | 3 | 84.0% | 87.0% | 4.1E−08 | 0.0028 | 50 | 23 |
| CDKN2A | VHL | 0.46 | 41 | 9 | 20 | 3 | 82.0% | 87.0% | 4.3E−10 | 0.0029 | 50 | 23 |
| CDKN2A | IL8 | 0.46 | 39 | 11 | 19 | 4 | 78.0% | 82.6% | 1.3E−07 | 0.0029 | 50 | 23 |
| CDKN2A | NME4 | 0.46 | 44 | 6 | 19 | 4 | 88.0% | 82.6% | 1.2E−09 | 0.0032 | 50 | 23 |
| CDKN2A | NFKB1 | 0.46 | 42 | 8 | 19 | 4 | 84.0% | 82.6% | 2.6E−10 | 0.0034 | 50 | 23 |
| SMAD4 | TIMP1 | 0.45 | 39 | 11 | 18 | 5 | 78.0% | 78.3% | 4.9E−09 | 5.3E−07 | 50 | 23 |
| CDK2 | CDKN2A | 0.45 | 42 | 8 | 19 | 4 | 84.0% | 82.6% | 0.0041 | 1.4E−10 | 50 | 23 |
| ITGB1 | RHOC | 0.45 | 41 | 9 | 19 | 4 | 82.0% | 82.6% | 7.9E−05 | 1.8E−08 | 50 | 23 |
| CASP8 | CDKN2A | 0.45 | 40 | 10 | 19 | 4 | 80.0% | 82.6% | 0.0050 | 1.5E−09 | 50 | 23 |
| CDKN2A | TP53 | 0.45 | 40 | 10 | 19 | 4 | 80.0% | 82.6% | 1.8E−10 | 0.0051 | 50 | 23 |
| PTCH1 | RHOC | 0.45 | 42 | 8 | 19 | 4 | 84.0% | 82.6% | 0.0001 | 3.3E−10 | 50 | 23 |
| ERBB2 | RHOC | 0.44 | 39 | 11 | 19 | 4 | 78.0% | 82.6% | 0.0001 | 6.8E−10 | 50 | 23 |
| NME4 | RHOC | 0.44 | 42 | 8 | 19 | 4 | 84.0% | 82.6% | 0.0001 | 2.4E−09 | 50 | 23 |
| ITGA3 | RHOC | 0.44 | 41 | 8 | 19 | 4 | 83.7% | 82.6% | 0.0001 | 6.7E−10 | 49 | 23 |
| ITGAE | TNF | 0.44 | 40 | 10 | 18 | 5 | 80.0% | 78.3% | 7.7E−06 | 3.7E−07 | 50 | 23 |
| CDKN2A | MYC | 0.44 | 38 | 12 | 19 | 4 | 76.0% | 82.6% | 6.6E−10 | 0.0086 | 50 | 23 |
| CDKN2A | PCNA | 0.44 | 42 | 8 | 20 | 3 | 84.0% | 87.0% | 3.1E−10 | 0.0097 | 50 | 23 |
| APAF1 | CDKN2A | 0.43 | 41 | 9 | 19 | 4 | 82.0% | 82.6% | 0.0101 | 7.5E−08 | 50 | 23 |
| MSH2 | NME4 | 0.43 | 41 | 9 | 19 | 4 | 82.0% | 82.6% | 4.0E−09 | 0.0002 | 50 | 23 |
| GZMA | MSH2 | 0.43 | 43 | 7 | 19 | 4 | 86.0% | 82.6% | 0.0002 | 1.0E−07 | 50 | 23 |
| RHOC | SRC | 0.43 | 42 | 8 | 20 | 3 | 84.0% | 87.0% | 8.9E−10 | 0.0003 | 50 | 23 |
| AKT1 | RHOC | 0.42 | 41 | 9 | 18 | 5 | 82.0% | 78.3% | 0.0003 | 6.3E−10 | 50 | 23 |
| CDKN2A | FOS | 0.42 | 39 | 10 | 18 | 5 | 79.6% | 78.3% | 2.1E−08 | 0.0205 | 49 | 23 |
| CDKN2A | NME1 | 0.42 | 44 | 6 | 19 | 4 | 88.0% | 82.6% | 6.5E−10 | 0.0225 | 50 | 23 |
| ATM | WNT1 | 0.42 | 43 | 7 | 19 | 4 | 86.0% | 82.6% | 8.4E−09 | 0.0012 | 50 | 23 |
| RHOC | SKI | 0.42 | 39 | 11 | 18 | 5 | 78.0% | 78.3% | 3.9E−09 | 0.0004 | 50 | 23 |
| MYCL1 | RHOC | 0.42 | 41 | 9 | 19 | 4 | 82.0% | 82.6% | 0.0004 | 7.7E−10 | 50 | 23 |
| ITGB1 | TNF | 0.41 | 39 | 11 | 19 | 4 | 78.0% | 82.6% | 2.9E−05 | 1.3E−07 | 50 | 23 |
| ATM | TGFB1 | 0.41 | 42 | 8 | 20 | 3 | 84.0% | 87.0% | 6.0E−08 | 0.0020 | 50 | 23 |
| ABL2 | RHOC | 0.41 | 41 | 9 | 18 | 5 | 82.0% | 78.3% | 0.0007 | 1.4E−09 | 50 | 23 |
| HRAS | RHOC | 0.41 | 42 | 8 | 19 | 4 | 84.0% | 82.6% | 0.0007 | 1.6E−09 | 50 | 23 |
| MYC | RHOC | 0.41 | 42 | 8 | 19 | 4 | 84.0% | 82.6% | 0.0007 | 2.7E−09 | 50 | 23 |
| AKT1 | CDKN2A | 0.41 | 40 | 10 | 19 | 4 | 80.0% | 82.6% | 0.0441 | 1.4E−09 | 50 | 23 |
| CDKN2A | E2F1 | 0.41 | 42 | 8 | 19 | 4 | 84.0% | 82.6% | 3.6E−06 | 0.0453 | 50 | 23 |
| CDKN2A | IL18 | 0.40 | 42 | 8 | 19 | 4 | 84.0% | 82.6% | 1.9E−08 | 0.0491 | 50 | 23 |
| RHOC | SKIL | 0.40 | 45 | 5 | 20 | 3 | 90.0% | 87.0% | 2.1E−05 | 0.0008 | 50 | 23 |
| ABL1 | CDKN2A | 0.40 | 41 | 9 | 18 | 5 | 82.0% | 78.3% | 0.0500 | 1.8E−09 | 50 | 23 |
| MSH2 | PCNA | 0.40 | 39 | 11 | 18 | 5 | 78.0% | 78.3% | 1.4E−09 | 0.0008 | 50 | 23 |
| EGR1 | RHOC | 0.40 | 38 | 12 | 18 | 5 | 76.0% | 78.3% | 0.0009 | 0.0001 | 50 | 23 |
| ATM | TIMP1 | 0.40 | 42 | 8 | 18 | 5 | 84.0% | 78.3% | 6.0E−08 | 0.0030 | 50 | 23 |
| TNF | TNFRSF10A | 0.40 | 39 | 11 | 19 | 4 | 78.0% | 82.6% | 5.3E−07 | 5.0E−05 | 50 | 23 |
| EGR1 | ITGAE | 0.40 | 42 | 8 | 19 | 4 | 84.0% | 82.6% | 2.6E−06 | 0.0001 | 50 | 23 |
| GZMA | SMAD4 | 0.40 | 45 | 5 | 18 | 5 | 90.0% | 78.3% | 7.9E−06 | 4.6E−07 | 50 | 23 |
| MSH2 | TNF | 0.40 | 42 | 8 | 20 | 3 | 84.0% | 87.0% | 6.1E−05 | 0.0012 | 50 | 23 |
| ATM | BAX | 0.40 | 38 | 12 | 19 | 4 | 76.0% | 82.6% | 2.6E−09 | 0.0039 | 50 | 23 |
| TNF | VHL | 0.39 | 42 | 8 | 18 | 5 | 84.0% | 78.3% | 9.3E−09 | 6.8E−05 | 50 | 23 |
| ATM | IFNG | 0.39 | 40 | 10 | 19 | 4 | 80.0% | 82.6% | 2.7E−09 | 0.0044 | 50 | 23 |
| ATM | BAD | 0.39 | 42 | 8 | 19 | 4 | 84.0% | 82.6% | 3.8E−09 | 0.0048 | 50 | 23 |
| NOTCH2 | RHOC | 0.39 | 43 | 7 | 18 | 5 | 86.0% | 78.3% | 0.0015 | 2.7E−09 | 50 | 23 |
| SKIL | TNFRSF6 | 0.39 | 42 | 8 | 19 | 4 | 84.0% | 82.6% | 2.6E−09 | 4.3E−05 | 50 | 23 |
| EGR1 | GZMA | 0.39 | 42 | 8 | 20 | 3 | 84.0% | 87.0% | 7.9E−07 | 0.0003 | 50 | 23 |
| GZMA | SKIL | 0.39 | 39 | 11 | 19 | 4 | 78.0% | 82.6% | 5.1E−05 | 8.0E−07 | 50 | 23 |
| SKI | TGFB1 | 0.38 | 39 | 11 | 19 | 4 | 78.0% | 82.6% | 2.0E−07 | 2.0E−08 | 50 | 23 |
| NFKB1 | TNF | 0.38 | 40 | 10 | 18 | 5 | 80.0% | 78.3% | 0.0001 | 8.1E−09 | 50 | 23 |
| RHOC | SEMA4D | 0.38 | 40 | 10 | 18 | 5 | 80.0% | 78.3% | 4.9E−09 | 0.0027 | 50 | 23 |
| RHOC | TNFRSF10B | 0.38 | 39 | 11 | 18 | 5 | 78.0% | 78.3% | 9.3E−09 | 0.0027 | 50 | 23 |
| MSH2 | TGFB1 | 0.38 | 43 | 7 | 19 | 4 | 86.0% | 82.6% | 2.4E−07 | 0.0027 | 50 | 23 |
| ATM | EGR1 | 0.38 | 41 | 9 | 19 | 4 | 82.0% | 82.6% | 0.0004 | 0.0095 | 50 | 23 |
| ATM | TP53 | 0.38 | 39 | 11 | 18 | 5 | 78.0% | 78.3% | 5.0E−09 | 0.0098 | 50 | 23 |
| ITGAE | TGFB1 | 0.38 | 38 | 12 | 18 | 5 | 76.0% | 78.3% | 2.7E−07 | 7.1E−06 | 50 | 23 |
| CASP8 | RHOC | 0.38 | 40 | 10 | 18 | 5 | 80.0% | 78.3% | 0.0033 | 4.5E−08 | 50 | 23 |
| ATM | ITGA1 | 0.37 | 38 | 12 | 18 | 5 | 76.0% | 78.3% | 8.2E−09 | 0.0127 | 50 | 23 |
| ATM | NME4 | 0.37 | 40 | 10 | 19 | 4 | 80.0% | 82.6% | 7.2E−08 | 0.0145 | 50 | 23 |
| ATM | TNFRSF6 | 0.37 | 40 | 10 | 18 | 5 | 80.0% | 78.3% | 6.6E−09 | 0.0145 | 50 | 23 |
| RHOA | RHOC | 0.37 | 40 | 10 | 18 | 5 | 80.0% | 78.3% | 0.0050 | 8.2E−09 | 50 | 23 |
| CDK4 | TNF | 0.37 | 38 | 12 | 18 | 5 | 76.0% | 78.3% | 0.0002 | 3.3E−08 | 50 | 23 |
| BCL2 | TNF | 0.37 | 38 | 12 | 18 | 5 | 76.0% | 78.3% | 0.0003 | 3.6E−08 | 50 | 23 |
| APAF1 | RHOC | 0.37 | 41 | 9 | 19 | 4 | 82.0% | 82.6% | 0.0056 | 2.0E−06 | 50 | 23 |
| ATM | PLAUR | 0.37 | 40 | 9 | 19 | 4 | 81.6% | 82.6% | 5.2E−08 | 0.0145 | 49 | 23 |
| ATM | IFITM1 | 0.36 | 39 | 11 | 18 | 5 | 78.0% | 78.3% | 3.8E−06 | 0.0193 | 50 | 23 |
| CDK5 | SMAD4 | 0.36 | 45 | 5 | 18 | 5 | 90.0% | 78.3% | 4.0E−05 | 1.9E−08 | 50 | 23 |
| FOS | RHOC | 0.36 | 38 | 11 | 19 | 4 | 77.6% | 82.6% | 0.0156 | 3.4E−07 | 49 | 23 |
| SKIL | TNF | 0.36 | 41 | 9 | 19 | 4 | 82.0% | 82.6% | 0.0003 | 0.0002 | 50 | 23 |
| RHOA | SMAD4 | 0.36 | 41 | 9 | 18 | 5 | 82.0% | 78.3% | 4.1E−05 | 1.0E−08 | 50 | 23 |
| ATM | TNFRSF1A | 0.36 | 44 | 6 | 18 | 5 | 88.0% | 78.3% | 4.4E−08 | 0.0208 | 50 | 23 |
| ABL1 | RHOC | 0.36 | 42 | 8 | 19 | 4 | 84.0% | 82.6% | 0.0065 | 1.3E−08 | 50 | 23 |
| ABL1 | ATM | 0.36 | 42 | 8 | 18 | 5 | 84.0% | 78.3% | 0.0215 | 1.3E−08 | 50 | 23 |
| ATM | IGFBP3 | 0.36 | 40 | 10 | 18 | 5 | 80.0% | 78.3% | 1.6E−08 | 0.0218 | 50 | 23 |
| CDKN2A | | 0.36 | 40 | 10 | 18 | 5 | 80.0% | 78.3% | 9.5E−09 | | 50 | 23 |
| NME4 | TNF | 0.36 | 40 | 10 | 18 | 5 | 80.0% | 78.3% | 0.0003 | 1.1E−07 | 50 | 23 |
| COL18A1 | RHOC | 0.36 | 39 | 11 | 19 | 4 | 78.0% | 82.6% | 0.0073 | 2.6E−08 | 50 | 23 |
| SMAD4 | TNFRSF1A | 0.36 | 40 | 10 | 18 | 5 | 80.0% | 78.3% | 5.3E−08 | 5.0E−05 | 50 | 23 |
| ATM | ITGAE | 0.36 | 38 | 12 | 18 | 5 | 76.0% | 78.3% | 1.7E−05 | 0.0261 | 50 | 23 |
| NRAS | SKIL | 0.36 | 44 | 6 | 19 | 4 | 88.0% | 82.6% | 0.0002 | 1.3E−07 | 50 | 23 |
| BRCA1 | RHOC | 0.36 | 39 | 11 | 18 | 5 | 78.0% | 78.3% | 0.0094 | 8.7E−08 | 50 | 23 |
| GZMA | ITGB1 | 0.35 | 40 | 10 | 18 | 5 | 80.0% | 78.3% | 2.0E−06 | 3.7E−06 | 50 | 23 |
| ATM | FOS | 0.35 | 38 | 11 | 18 | 5 | 77.6% | 78.3% | 5.8E−07 | 0.0340 | 49 | 23 |
| EGR1 | SMAD4 | 0.35 | 41 | 9 | 18 | 5 | 82.0% | 78.3% | 7.1E−05 | 0.0014 | 50 | 23 |
| MSH2 | NRAS | 0.35 | 39 | 11 | 19 | 4 | 78.0% | 82.6% | 1.9E−07 | 0.0122 | 50 | 23 |
| IFITM1 | SKIL | 0.35 | 41 | 9 | 18 | 5 | 82.0% | 78.3% | 0.0003 | 7.7E−06 | 50 | 23 |
| BAX | MSH2 | 0.35 | 38 | 12 | 19 | 4 | 76.0% | 82.6% | 0.0125 | 2.3E−08 | 50 | 23 |
| ATM | RHOA | 0.35 | 38 | 12 | 18 | 5 | 76.0% | 78.3% | 2.0E−08 | 0.0449 | 50 | 23 |
| ATM | PTCH1 | 0.35 | 40 | 10 | 18 | 5 | 80.0% | 78.3% | 3.0E−08 | 0.0450 | 50 | 23 |
| MSH2 | TIMP1 | 0.35 | 41 | 9 | 19 | 4 | 82.0% | 82.6% | 7.4E−07 | 0.0134 | 50 | 23 |
| ATM | RB1 | 0.35 | 39 | 11 | 18 | 5 | 78.0% | 78.3% | 2.1E−07 | 0.0468 | 50 | 23 |
| ATM | IL8 | 0.35 | 39 | 11 | 18 | 5 | 78.0% | 78.3% | 2.7E−05 | 0.0476 | 50 | 23 |
| SKIL | TIMP1 | 0.35 | 42 | 8 | 19 | 4 | 84.0% | 82.6% | 7.9E−07 | 0.0003 | 50 | 23 |
| CDK5 | RHOC | 0.35 | 41 | 9 | 19 | 4 | 82.0% | 82.6% | 0.0152 | 4.3E−08 | 50 | 23 |
| CFLAR | RHOC | 0.34 | 40 | 10 | 18 | 5 | 80.0% | 78.3% | 0.0167 | 2.8E−07 | 50 | 23 |
| ITGAE | TIMP1 | 0.34 | 39 | 11 | 18 | 5 | 78.0% | 78.3% | 8.8E−07 | 3.4E−05 | 50 | 23 |
| BAX | RHOC | 0.34 | 42 | 8 | 18 | 5 | 84.0% | 78.3% | 0.0168 | 2.9E−08 | 50 | 23 |
| TNF | TP53 | 0.34 | 40 | 10 | 18 | 5 | 80.0% | 78.3% | 2.5E−08 | 0.0008 | 50 | 23 |
| ITGAE | MSH2 | 0.34 | 44 | 6 | 18 | 5 | 88.0% | 78.3% | 0.0175 | 3.7E−05 | 50 | 23 |
| MSH2 | NME1 | 0.34 | 39 | 11 | 18 | 5 | 78.0% | 78.3% | 2.4E−08 | 0.0177 | 50 | 23 |
| MSH2 | WNT1 | 0.34 | 42 | 8 | 19 | 4 | 84.0% | 82.6% | 3.1E−07 | 0.0178 | 50 | 23 |
| SMAD4 | WNT1 | 0.34 | 41 | 9 | 19 | 4 | 82.0% | 82.6% | 3.3E−07 | 0.0001 | 50 | 23 |
| MSH2 | S100A4 | 0.34 | 41 | 9 | 19 | 4 | 82.0% | 82.6% | 3.4E−08 | 0.0191 | 50 | 23 |
| RB1 | RHOC | 0.34 | 41 | 9 | 19 | 4 | 82.0% | 82.6% | 0.0208 | 3.0E−07 | 50 | 23 |
| ITGB1 | NRAS | 0.34 | 42 | 8 | 18 | 5 | 84.0% | 78.3% | 3.2E−07 | 4.0E−06 | 50 | 23 |
| IFITM1 | MSH2 | 0.34 | 40 | 10 | 18 | 5 | 80.0% | 78.3% | 0.0230 | 1.4E−05 | 50 | 23 |
| E2F1 | RHOC | 0.34 | 39 | 11 | 18 | 5 | 78.0% | 78.3% | 0.0247 | 9.9E−05 | 50 | 23 |
| CDK5 | MSH2 | 0.34 | 44 | 6 | 19 | 4 | 88.0% | 82.6% | 0.0246 | 6.9E−08 | 50 | 23 |
| EGR1 | MSH2 | 0.34 | 39 | 11 | 19 | 4 | 78.0% | 82.6% | 0.0251 | 0.0031 | 50 | 23 |
| BAD | MSH2 | 0.34 | 40 | 10 | 18 | 5 | 80.0% | 78.3% | 0.0256 | 5.4E−08 | 50 | 23 |
| APAF1 | IFITM1 | 0.33 | 39 | 11 | 18 | 5 | 78.0% | 78.3% | 1.6E−05 | 9.0E−06 | 50 | 23 |
| IL8 | RHOC | 0.33 | 40 | 10 | 18 | 5 | 80.0% | 78.3% | 0.0301 | 5.4E−05 | 50 | 23 |
| APAF1 | TNF | 0.33 | 38 | 12 | 18 | 5 | 76.0% | 78.3% | 0.0014 | 1.0E−05 | 50 | 23 |
| BRAF | RHOC | 0.33 | 40 | 10 | 18 | 5 | 80.0% | 78.3% | 0.0340 | 1.2E−07 | 50 | 23 |
| ABL2 | SMAD4 | 0.33 | 40 | 10 | 19 | 4 | 80.0% | 82.6% | 0.0002 | 5.9E−08 | 50 | 23 |
| MSH2 | PLAUR | 0.33 | 37 | 12 | 18 | 5 | 75.5% | 78.3% | 3.1E−07 | 0.0299 | 49 | 23 |
| GZMA | RHOC | 0.33 | 42 | 8 | 19 | 4 | 84.0% | 82.6% | 0.0434 | 1.4E−05 | 50 | 23 |
| FOS | MSH2 | 0.32 | 40 | 9 | 19 | 4 | 81.6% | 82.6% | 0.0436 | 2.1E−06 | 49 | 23 |
| IL8 | MSH2 | 0.32 | 39 | 11 | 18 | 5 | 78.0% | 78.3% | 0.0448 | 8.0E−05 | 50 | 23 |
| EGR1 | SKIL | 0.32 | 41 | 9 | 18 | 5 | 82.0% | 78.3% | 0.0011 | 0.0057 | 50 | 23 |
| NME4 | SKIL | 0.32 | 39 | 11 | 18 | 5 | 78.0% | 78.3% | 0.0012 | 7.0E−07 | 50 | 23 |
| E2F1 | ITGAE | 0.32 | 39 | 11 | 18 | 5 | 78.0% | 78.3% | 0.0001 | 0.0002 | 50 | 23 |
| E2F1 | GZMA | 0.32 | 39 | 11 | 18 | 5 | 78.0% | 78.3% | 2.2E−05 | 0.0003 | 50 | 23 |
| APAF1 | FOS | 0.31 | 38 | 11 | 18 | 5 | 77.6% | 78.3% | 3.5E−06 | 2.0E−05 | 49 | 23 |
| BRAF | TNF | 0.31 | 41 | 9 | 18 | 5 | 82.0% | 78.3% | 0.0035 | 2.7E−07 | 50 | 23 |
| GZMA | IL8 | 0.31 | 40 | 10 | 18 | 5 | 80.0% | 78.3% | 0.0002 | 2.8E−05 | 50 | 23 |
| SKIL | TGFB1 | 0.31 | 41 | 9 | 18 | 5 | 82.0% | 78.3% | 6.6E−06 | 0.0021 | 50 | 23 |
| FOS | SKIL | 0.31 | 40 | 9 | 18 | 5 | 81.6% | 78.3% | 0.0018 | 4.7E−06 | 49 | 23 |
| TGFB1 | TNFRSF10A | 0.30 | 40 | 10 | 18 | 5 | 80.0% | 78.3% | 5.0E−05 | 8.5E−06 | 50 | 23 |
| IL1B | SKIL | 0.30 | 42 | 8 | 18 | 5 | 84.0% | 78.3% | 0.0032 | 2.9E−07 | 50 | 23 |
| SEMA4D | TNF | 0.30 | 42 | 8 | 18 | 5 | 84.0% | 78.3% | 0.0073 | 2.3E−07 | 50 | 23 |
| APAF1 | EGR1 | 0.30 | 40 | 10 | 18 | 5 | 80.0% | 78.3% | 0.0211 | 5.0E−05 | 50 | 23 |
| SKIL | TNFRSF1A | 0.30 | 42 | 8 | 18 | 5 | 84.0% | 78.3% | 9.4E−07 | 0.0038 | 50 | 23 |
| APAF1 | TGFB1 | 0.30 | 40 | 10 | 19 | 4 | 80.0% | 82.6% | 1.3E−05 | 5.4E−05 | 50 | 23 |
| EGR1 | SKI | 0.29 | 40 | 10 | 19 | 4 | 80.0% | 82.6% | 1.3E−06 | 0.0247 | 50 | 23 |
| PLAUR | SKIL | 0.29 | 38 | 11 | 18 | 5 | 77.6% | 78.3% | 0.0038 | 1.5E−06 | 49 | 23 |
| IL8 | TNF | 0.29 | 39 | 11 | 18 | 5 | 78.0% | 78.3% | 0.0105 | 0.0004 | 50 | 23 |
| CDK5 | SKIL | 0.29 | 38 | 12 | 18 | 5 | 76.0% | 78.3% | 0.0057 | 6.1E−07 | 50 | 23 |
| EGR1 | MYC | 0.29 | 38 | 12 | 18 | 5 | 76.0% | 78.3% | 7.6E−07 | 0.0363 | 50 | 23 |
| BAD | SMAD4 | 0.29 | 39 | 11 | 18 | 5 | 78.0% | 78.3% | 0.0017 | 5.4E−07 | 50 | 23 |
| COL18A1 | EGR1 | 0.29 | 40 | 10 | 18 | 5 | 80.0% | 78.3% | 0.0390 | 8.5E−07 | 50 | 23 |
| PCNA | SMAD4 | 0.29 | 42 | 8 | 19 | 4 | 84.0% | 82.6% | 0.0017 | 3.4E−07 | 50 | 23 |
| GZMA | IFITM1 | 0.29 | 41 | 9 | 18 | 5 | 82.0% | 78.3% | 0.0002 | 9.4E−05 | 50 | 23 |
| CFLAR | TNF | 0.29 | 39 | 11 | 18 | 5 | 78.0% | 78.3% | 0.0141 | 4.5E−06 | 50 | 23 |
| BCL2 | EGR1 | 0.28 | 41 | 9 | 18 | 5 | 82.0% | 78.3% | 0.0434 | 1.7E−06 | 50 | 23 |
| MMP9 | SKIL | 0.28 | 41 | 9 | 19 | 4 | 82.0% | 82.6% | 0.0084 | 1.9E−06 | 50 | 23 |
| RHOC | | 0.28 | 38 | 12 | 18 | 5 | 76.0% | 78.3% | 4.2E−07 | | 50 | 23 |
| E2F1 | TNF | 0.28 | 38 | 12 | 18 | 5 | 76.0% | 78.3% | 0.0178 | 0.0015 | 50 | 23 |
| MSH2 | | 0.28 | 41 | 9 | 19 | 4 | 82.0% | 82.6% | 4.4E−07 | | 50 | 23 |
| BAX | TNFRSF10A | 0.28 | 38 | 12 | 18 | 5 | 76.0% | 78.3% | 0.0002 | 7.4E−07 | 50 | 23 |
| NRAS | VHL | 0.28 | 39 | 11 | 18 | 5 | 78.0% | 78.3% | 2.5E−06 | 6.4E−06 | 50 | 23 |
| NRAS | TNFRSF10A | 0.27 | 40 | 10 | 18 | 5 | 80.0% | 78.3% | 0.0002 | 6.6E−06 | 50 | 23 |
| ITGA1 | SKIL | 0.27 | 39 | 11 | 18 | 5 | 78.0% | 78.3% | 0.0126 | 8.4E−07 | 50 | 23 |
| IFITM1 | ITGAE | 0.27 | 40 | 10 | 18 | 5 | 80.0% | 78.3% | 0.0011 | 0.0003 | 50 | 23 |
| PCNA | SKIL | 0.27 | 45 | 5 | 18 | 5 | 90.0% | 78.3% | 0.0176 | 8.1E−07 | 50 | 23 |
| ITGAE | PLAUR | 0.27 | 38 | 11 | 18 | 5 | 77.6% | 78.3% | 5.6E−06 | 0.0013 | 49 | 23 |
| ABL1 | SMAD4 | 0.26 | 40 | 10 | 18 | 5 | 80.0% | 78.3% | 0.0053 | 1.3E−06 | 50 | 23 |
| BAX | ITGAE | 0.26 | 39 | 11 | 18 | 5 | 78.0% | 78.3% | 0.0017 | 1.3E−06 | 50 | 23 |
| SERPINE1 | SKIL | 0.26 | 38 | 12 | 18 | 5 | 76.0% | 78.3% | 0.0269 | 2.8E−05 | 50 | 23 |
| NOTCH2 | SMAD4 | 0.26 | 39 | 11 | 18 | 5 | 78.0% | 78.3% | 0.0069 | 1.4E−06 | 50 | 23 |
| BAX | SMAD4 | 0.26 | 43 | 7 | 19 | 4 | 86.0% | 82.6% | 0.0072 | 1.7E−06 | 50 | 23 |
| BAD | ITGAE | 0.26 | 40 | 10 | 18 | 5 | 80.0% | 78.3% | 0.0024 | 2.2E−06 | 50 | 23 |
| ITGAE | WNT1 | 0.25 | 38 | 12 | 18 | 5 | 76.0% | 78.3% | 2.0E−05 | 0.0027 | 50 | 23 |
| CFLAR | TGFB1 | 0.25 | 38 | 12 | 18 | 5 | 76.0% | 78.3% | 0.0001 | 2.6E−05 | 50 | 23 |
| CDK2 | SMAD4 | 0.24 | 39 | 11 | 18 | 5 | 78.0% | 78.3% | 0.0139 | 2.4E−06 | 50 | 23 |
| S100A4 | SMAD4 | 0.24 | 40 | 10 | 18 | 5 | 80.0% | 78.3% | 0.0151 | 3.4E−06 | 50 | 23 |
| FOS | PTEN | 0.24 | 38 | 11 | 18 | 5 | 77.6% | 78.3% | 8.0E−05 | 0.0001 | 49 | 23 |
| ITGB1 | WNT1 | 0.24 | 38 | 12 | 18 | 5 | 76.0% | 78.3% | 3.6E−05 | 0.0004 | 50 | 23 |
| EGR1 | | 0.24 | 39 | 11 | 18 | 5 | 78.0% | 78.3% | 3.0E−06 | | 50 | 23 |
| FOS | IL8 | 0.24 | 38 | 11 | 18 | 5 | 77.6% | 78.3% | 0.0071 | 0.0001 | 49 | 23 |
| ITGAE | SMAD4 | 0.24 | 40 | 10 | 18 | 5 | 80.0% | 78.3% | 0.0224 | 0.0071 | 50 | 23 |
| CDK4 | TGFB1 | 0.23 | 38 | 12 | 18 | 5 | 76.0% | 78.3% | 0.0003 | 2.1E−05 | 50 | 23 |
| BAD | TNFRSF10A | 0.23 | 38 | 12 | 18 | 5 | 76.0% | 78.3% | 0.0018 | 7.6E−06 | 50 | 23 |
| CDKN1A | NME4 | 0.23 | 40 | 10 | 18 | 5 | 80.0% | 78.3% | 6.2E−05 | 0.0001 | 50 | 23 |
| IFITM1 | TNFRSF10A | 0.22 | 38 | 12 | 18 | 5 | 76.0% | 78.3% | 0.0025 | 0.0033 | 50 | 23 |
| ABL2 | TNFRSF10A | 0.22 | 40 | 10 | 18 | 5 | 80.0% | 78.3% | 0.0025 | 8.3E−06 | 50 | 23 |

TABLE 3B

| | Colon | Normals | Sum |
|---|---|---|---|
| Group Size | 31.5% | 68.5% | 100% |
| N = | 23 | 50 | 73 |

| Gene | Mean | Mean | p-val |
|---|---|---|---|
| CDKN2A | 20.1 | 21.1 | 9.5E−09 |
| ATM | 17.3 | 16.5 | 1.4E−07 |
| RHOC | 15.9 | 16.6 | 4.2E−07 |
| MSH2 | 18.7 | 17.9 | 4.4E−07 |
| EGR1 | 18.9 | 19.8 | 3.0E−06 |
| TNF | 18.1 | 18.7 | 8.0E−06 |
| SKIL | 18.6 | 17.8 | 1.5E−05 |
| SMAD4 | 17.3 | 16.9 | 5.7E−05 |
| E2F1 | 19.5 | 20.2 | 8.4E−05 |
| ITGAE | 24.3 | 23.3 | 0.0002 |
| IL8 | 22.3 | 21.4 | 0.0002 |
| IFITM1 | 8.4 | 9.0 | 0.0006 |
| TNFRSF10A | 21.2 | 20.7 | 0.0008 |
| GZMA | 17.3 | 17.8 | 0.0010 |
| APAF1 | 17.5 | 17.0 | 0.0011 |
| ITGB1 | 14.9 | 14.5 | 0.0020 |
| TGFB1 | 12.4 | 12.7 | 0.0050 |
| TIMP1 | 14.1 | 14.5 | 0.0076 |
| PTEN | 14.2 | 13.8 | 0.0088 |
| FOS | 15.1 | 15.6 | 0.0091 |
| SERPINE1 | 20.6 | 21.1 | 0.0139 |
| SOCS1 | 16.4 | 16.8 | 0.0139 |
| CDKN1A | 15.9 | 16.3 | 0.0149 |
| ANGPT1 | 21.1 | 20.6 | 0.0172 |
| IL18 | 22.1 | 21.7 | 0.0226 |
| WNT1 | 21.2 | 21.6 | 0.0258 |
| CFLAR | 14.9 | 14.6 | 0.0262 |
| NRAS | 16.8 | 17.0 | 0.0309 |
| RB1 | 17.8 | 17.5 | 0.0310 |
| NME4 | 17.6 | 17.3 | 0.0313 |
| CASP8 | 15.2 | 15.0 | 0.0380 |
| BRCA1 | 21.6 | 21.3 | 0.0548 |
| SKI | 17.5 | 17.2 | 0.0638 |
| PLAUR | 14.6 | 14.9 | 0.0695 |
| ICAM1 | 16.8 | 17.0 | 0.0697 |
| TNFRSF1A | 15.1 | 15.4 | 0.0809 |
| BCL2 | 17.3 | 17.1 | 0.0859 |
| MMP9 | 14.1 | 14.6 | 0.0877 |
| CDK4 | 17.8 | 17.6 | 0.0890 |
| VHL | 17.4 | 17.2 | 0.0929 |
| CDC25A | 22.7 | 23.1 | 0.1161 |
| ERBB2 | 22.6 | 22.4 | 0.1360 |
| BRAF | 16.9 | 16.7 | 0.1511 |
| G1P3 | 15.1 | 15.4 | 0.1615 |
| COL18A1 | 23.8 | 23.3 | 0.1790 |
| CCNE1 | 22.8 | 23.1 | 0.1892 |
| MYC | 18.3 | 18.1 | 0.1898 |
| ITGA3 | 22.0 | 21.8 | 0.2006 |
| TNFRSF10B | 17.2 | 17.0 | 0.2062 |
| NFKB1 | 16.8 | 16.7 | 0.2158 |
| CDK5 | 18.5 | 18.6 | 0.2245 |
| RAF1 | 14.5 | 14.3 | 0.2450 |
| THBS1 | 17.1 | 17.4 | 0.2556 |
| SRC | 18.1 | 18.3 | 0.2746 |
| IL1B | 15.6 | 15.8 | 0.2977 |
| PTCH1 | 20.1 | 19.9 | 0.3142 |
| IGFBP3 | 22.1 | 22.4 | 0.3151 |
| BAD | 18.1 | 18.2 | 0.3319 |
| HRAS | 20.2 | 20.0 | 0.3962 |
| ITGA1 | 21.0 | 21.1 | 0.4121 |
| FGFR2 | 22.5 | 22.8 | 0.4215 |
| ABL1 | 18.1 | 18.2 | 0.4378 |
| S100A4 | 13.0 | 13.2 | 0.4606 |
| ABL2 | 20.1 | 20.2 | 0.4676 |
| BAX | 15.6 | 15.7 | 0.4717 |
| IFNG | 23.1 | 23.3 | 0.5189 |
| SEMA4D | 14.3 | 14.2 | 0.5559 |
| AKT1 | 15.1 | 15.0 | 0.5652 |
| PLAU | 23.9 | 24.0 | 0.6255 |
| RHOA | 11.6 | 11.6 | 0.6256 |
| NOTCH2 | 16.0 | 15.9 | 0.6295 |
| TP53 | 16.3 | 16.2 | 0.7109 |
| MYCL1 | 18.5 | 18.6 | 0.7168 |
| JUN | 20.9 | 20.9 | 0.8098 |
| CDK2 | 19.2 | 19.2 | 0.8892 |
| VEGF | 22.7 | 22.8 | 0.9203 |
| TNFRSF6 | 16.4 | 16.4 | 0.9420 |
| NME1 | 19.3 | 19.3 | 0.9578 |
| PCNA | 18.1 | 18.1 | 0.9609 |

TABLE 3C

| | | | | | | Predicted |
|---|---|---|---|---|---|---|
| | | | | | | probability |
| Patient ID | Group | ATM | CDKN2A | logit | odds | of colon cancer |
| CC-035 | Colon Cancer | 19.12 | 20.14 | 11.66 | 1.2E+05 | 1.0000 |
| CC-020 | Colon Cancer | 18.09 | 19.23 | 9.86 | 1.9E+04 | 0.9999 |
| CC-019 | Colon Cancer | 18.11 | 19.40 | 9.39 | 1.2E+04 | 0.9999 |
| CC-005 | Colon Cancer | 17.88 | 19.87 | 6.71 | 8.2E+02 | 0.9988 |
| CC-014 | Colon Cancer | 18.04 | 20.26 | 6.14 | 4.7E+02 | 0.9979 |
| CC-004 | Colon Cancer | 17.38 | 19.40 | 5.95 | 3.8E+02 | 0.9974 |
| CC-031 | Colon Cancer | 16.78 | 19.26 | 3.60 | 3.7E+01 | 0.9734 |
| CC-013 | Colon Cancer | 17.61 | 20.60 | 2.98 | 2.0E+01 | 0.9516 |
| CC-034 | Colon Cancer | 16.87 | 19.64 | 2.77 | 1.6E+01 | 0.9413 |
| CC-007 | Colon Cancer | 17.45 | 20.48 | 2.64 | 1.4E+01 | 0.9337 |
| CC-018 | Colon Cancer | 16.35 | 19.03 | 2.35 | 1.0E+01 | 0.9129 |
| CC-006 | Colon Cancer | 17.11 | 20.13 | 2.25 | 9.4E+00 | 0.9043 |
| CC-003 | Colon Cancer | 17.35 | 20.48 | 2.19 | 9.0E+00 | 0.8997 |
| CC-032 | Colon Cancer | 16.98 | 19.96 | 2.16 | 8.6E+00 | 0.8963 |
| CC-009 | Colon Cancer | 16.64 | 19.60 | 1.79 | 6.0E+00 | 0.8575 |
| CC-012 | Colon Cancer | 17.18 | 20.41 | 1.62 | 5.1E+00 | 0.8353 |
| HN-040 | Normal | 17.42 | 20.77 | 1.56 | 4.8E+00 | 0.8269 |
| HN-049 | Normal | 17.05 | 20.42 | 0.97 | 2.6E+00 | 0.7244 |
| CC-011 | Colon Cancer | 16.60 | 19.80 | 0.94 | 2.6E+00 | 0.7190 |
| HN-035 | Normal | 16.61 | 19.82 | 0.93 | 2.5E+00 | 0.7166 |
| CC-002 | Colon Cancer | 17.03 | 20.52 | 0.52 | 1.7E+00 | 0.6264 |
| CC-008 | Colon Cancer | 17.30 | 20.94 | 0.43 | 1.5E+00 | 0.6051 |
| CC-010 | Colon Cancer | 17.49 | 21.31 | 0.07 | 1.1E+00 | 0.5168 |
| HN-041 | Normal | 16.70 | 20.26 | −0.12 | 8.9E−01 | 0.4711 |
| HN-016 | Normal | 17.14 | 21.12 | −0.96 | 3.8E−01 | 0.2773 |
| HN-012 | Normal | 16.28 | 19.97 | −1.14 | 3.2E−01 | 0.2426 |
| CC-033 | Colon Cancer | 16.39 | 20.15 | −1.22 | 3.0E−01 | 0.2285 |
| HN-019 | Normal | 16.72 | 20.66 | −1.41 | 2.4E−01 | 0.1959 |
| HN-014 | Normal | 16.79 | 20.82 | −1.59 | 2.0E−01 | 0.1697 |
| CC-015 | Colon Cancer | 16.73 | 20.76 | −1.70 | 1.8E−01 | 0.1549 |
| HN-050 | Normal | 16.38 | 20.33 | −1.87 | 1.5E−01 | 0.1335 |
| HN-104 | Normal | 16.39 | 20.36 | −1.91 | 1.5E−01 | 0.1286 |
| HN-001 | Normal | 17.04 | 21.30 | −2.02 | 1.3E−01 | 0.1173 |
| HN-005 | Normal | 16.22 | 20.17 | −2.06 | 1.3E−01 | 0.1133 |
| HN-039 | Normal | 16.63 | 20.76 | −2.13 | 1.2E−01 | 0.1058 |
| HN-004 | Normal | 16.55 | 20.65 | −2.15 | 1.2E−01 | 0.1045 |
| HN-030 | Normal | 16.82 | 21.05 | −2.25 | 1.1E−01 | 0.0956 |
| CC-001 | Colon Cancer | 16.53 | 20.74 | −2.53 | 8.0E−02 | 0.0738 |
| HN-036 | Normal | 16.76 | 21.12 | −2.72 | 6.6E−02 | 0.0619 |
| HN-020 | Normal | 16.59 | 20.94 | −2.93 | 5.4E−02 | 0.0509 |
| HN-047 | Normal | 16.43 | 20.72 | −2.97 | 5.2E−02 | 0.0490 |
| HN-007 | Normal | 16.18 | 20.46 | −3.22 | 4.0E−02 | 0.0383 |
| HN-034 | Normal | 16.73 | 21.22 | −3.23 | 4.0E−02 | 0.0382 |
| HN-029 | Normal | 17.15 | 21.83 | −3.28 | 3.8E−02 | 0.0363 |
| HN-038 | Normal | 16.47 | 20.88 | −3.28 | 3.8E−02 | 0.0363 |
| HN-106 | Normal | 16.09 | 20.34 | −3.28 | 3.8E−02 | 0.0362 |
| HN-045 | Normal | 16.35 | 20.79 | −3.55 | 2.9E−02 | 0.0280 |
| HN-101 | Normal | 16.11 | 20.46 | −3.57 | 2.8E−02 | 0.0274 |
| HN-044 | Normal | 16.24 | 20.66 | −3.61 | 2.7E−02 | 0.0264 |
| HN-002 | Normal | 17.32 | 22.28 | −4.01 | 1.8E−02 | 0.0179 |
| HN-003 | Normal | 16.73 | 21.51 | −4.16 | 1.6E−02 | 0.0153 |
| HN-022 | Normal | 17.26 | 22.31 | −4.39 | 1.2E−02 | 0.0122 |
| HN-013 | Normal | 16.48 | 21.24 | −4.44 | 1.2E−02 | 0.0116 |
| HN-028 | Normal | 16.12 | 20.79 | −4.63 | 9.8E−03 | 0.0097 |
| HN-107 | Normal | 16.48 | 21.36 | −4.85 | 7.8E−03 | 0.0078 |
| HN-032 | Normal | 16.37 | 21.24 | −4.95 | 7.1E−03 | 0.0070 |
| HN-037 | Normal | 16.83 | 21.92 | −5.09 | 6.1E−03 | 0.0061 |
| HN-010 | Normal | 15.87 | 20.59 | −5.15 | 5.8E−03 | 0.0058 |
| HN-024 | Normal | 16.54 | 21.60 | −5.34 | 4.8E−03 | 0.0048 |
| HN-102 | Normal | 16.03 | 20.91 | −5.47 | 4.2E−03 | 0.0042 |
| HN-026 | Normal | 16.62 | 21.77 | −5.54 | 3.9E−03 | 0.0039 |
| HN-008 | Normal | 15.93 | 20.89 | −5.85 | 2.9E−03 | 0.0029 |
| HN-009 | Normal | 16.36 | 21.57 | −6.10 | 2.2E−03 | 0.0022 |
| HN-103 | Normal | 15.65 | 20.59 | −6.17 | 2.1E−03 | 0.0021 |
| HN-027 | Normal | 16.17 | 21.37 | −6.33 | 1.8E−03 | 0.0018 |
| HN-015 | Normal | 16.47 | 21.80 | −6.35 | 1.7E−03 | 0.0017 |
| HN-025 | Normal | 16.09 | 21.46 | −7.02 | 8.9E−04 | 0.0009 |
| HN-105 | Normal | 16.21 | 21.67 | −7.16 | 7.8E−04 | 0.0008 |
| HN-042 | Normal | 15.94 | 21.36 | −7.36 | 6.3E−04 | 0.0006 |
| HN-017 | Normal | 16.74 | 22.53 | −7.53 | 5.4E−04 | 0.0005 |
| HN-018 | Normal | 16.46 | 22.16 | −7.61 | 4.9E−04 | 0.0005 |
| HN-033 | Normal | 17.15 | 23.74 | −9.65 | 6.4E−05 | 0.0001 |
| HN-021 | Normal | 16.07 | 22.74 | −11.39 | 1.1E−05 | 0.0000 |

TABLE 4A

| | | | | | | | Normal | Colon | | | total used | |
|---|---|---|---|---|---|---|---|---|---|---|---|---|
| | | | | | | N = | 50 | 22 | | | (excludes missing) | |
| | | Entropy | #normal | #normal | #cc | #cc | Correct | Correct | | | | # |
| 2-gene models | | R-sq | Correct | FALSE | Correct | FALSE | Classification | Classification | p-val 1 | p-val 2 | # normals | disease |
| NAB2 | TGFB1 | 0.45 | 41 | 9 | 18 | 4 | 82.0% | 81.8% | 6.4E−09 | 4.6E−07 | 50 | 22 |
| MAP2K1 | TGFB1 | 0.45 | 44 | 6 | 18 | 4 | 88.0% | 81.8% | 7.6E−09 | 1.5E−09 | 50 | 22 |
| TGFB1 | TOPBP1 | 0.42 | 38 | 12 | 18 | 4 | 76.0% | 81.8% | 2.1E−06 | 2.9E−08 | 50 | 22 |
| ICAM1 | TOPBP1 | 0.30 | 41 | 9 | 18 | 4 | 82.0% | 81.8% | 0.0007 | 1.1E−06 | 50 | 22 |
| CEBPB | TOPBP1 | 0.29 | 39 | 11 | 17 | 5 | 78.0% | 77.3% | 0.0011 | 9.6E−07 | 50 | 22 |
| EGR1 | NAB2 | 0.28 | 41 | 9 | 18 | 4 | 82.0% | 81.8% | 0.0016 | 0.0002 | 50 | 22 |
| NR4A2 | TGFB1 | 0.27 | 40 | 10 | 17 | 5 | 80.0% | 77.3% | 2.8E−05 | 7.3E−05 | 50 | 22 |
| NAB2 | PDGFA | 0.27 | 39 | 11 | 17 | 5 | 78.0% | 77.3% | 6.4E−06 | 0.0025 | 50 | 22 |
| CREBBP | TOPBP1 | 0.27 | 41 | 9 | 17 | 5 | 82.0% | 77.3% | 0.0026 | 1.3E−06 | 50 | 22 |
| FOS | NR4A2 | 0.26 | 38 | 11 | 17 | 5 | 77.6% | 77.3% | 0.0001 | 4.7E−05 | 49 | 22 |
| NAB1 | TGFB1 | 0.26 | 40 | 10 | 17 | 5 | 80.0% | 77.3% | 4.5E−05 | 0.0002 | 50 | 22 |
| EGR1 | NR4A2 | 0.26 | 39 | 11 | 17 | 5 | 78.0% | 77.3% | 0.0001 | 0.0004 | 50 | 22 |
| TOPBP1 | TNFRSF6 | 0.26 | 39 | 11 | 17 | 5 | 78.0% | 77.3% | 2.1E−06 | 0.0046 | 50 | 22 |
| NFKB1 | TOPBP1 | 0.23 | 38 | 12 | 17 | 5 | 76.0% | 77.3% | 0.0165 | 1.4E−05 | 50 | 22 |
| SRC | TOPBP1 | 0.23 | 39 | 11 | 17 | 5 | 78.0% | 77.3% | 0.0176 | 8.7E−06 | 50 | 22 |
| NAB2 | TOPBP1 | 0.23 | 39 | 11 | 17 | 5 | 78.0% | 77.3% | 0.0204 | 0.0205 | 50 | 22 |
| FOS | PTEN | 0.22 | 38 | 11 | 17 | 5 | 77.6% | 77.3% | 0.0001 | 0.0003 | 49 | 22 |
| NAB2 | PTEN | 0.22 | 39 | 11 | 17 | 5 | 78.0% | 77.3% | 0.0002 | 0.0237 | 50 | 22 |
| EGR2 | NAB1 | 0.20 | 42 | 8 | 17 | 5 | 84.0% | 77.3% | 0.0039 | 0.0011 | 50 | 22 |

TABLE 4B

| | Colon | Normals | Sum |
|---|---|---|---|
| Group Size | 30.6% | 69.4% | 100% |
| N = | 22 | 50 | 72 |

| Gene | Mean | Mean | p-val |
|---|---|---|---|
| NAB2 | 20.42 | 19.91 | 0.0001 |
| TOPBP1 | 18.53 | 18.03 | 0.0001 |
| EGR1 | 19.19 | 19.85 | 0.0013 |
| NAB1 | 17.27 | 16.92 | 0.0025 |
| NR4A2 | 21.49 | 20.88 | 0.0041 |
| EGR2 | 23.57 | 24.11 | 0.0089 |
| TGFB1 | 12.43 | 12.73 | 0.0114 |
| FOS | 15.10 | 15.59 | 0.0122 |
| SERPINE1 | 20.62 | 21.10 | 0.0146 |
| PTEN | 14.16 | 13.81 | 0.0190 |
| PDGFA | 19.05 | 19.40 | 0.0628 |
| MAP2K1 | 16.01 | 15.81 | 0.0717 |
| ICAM1 | 16.80 | 17.05 | 0.1086 |
| NFKB1 | 16.85 | 16.68 | 0.2021 |
| CEBPB | 14.55 | 14.73 | 0.2435 |
| CCND2 | 16.82 | 16.47 | 0.2787 |
| RAF1 | 14.49 | 14.34 | 0.2979 |
| S100A6 | 14.22 | 14.01 | 0.3606 |
| THBS1 | 17.19 | 17.43 | 0.3724 |
| CDKN2D | 14.95 | 14.87 | 0.3830 |
| SMAD3 | 18.03 | 17.91 | 0.4187 |
| SRC | 18.16 | 18.27 | 0.4484 |
| TP53 | 16.30 | 16.23 | 0.5315 |
| CREBBP | 15.12 | 15.05 | 0.5858 |
| PLAU | 23.92 | 24.04 | 0.6141 |
| ALOX5 | 15.59 | 15.68 | 0.6414 |
| TNFRSF6 | 16.34 | 16.40 | 0.6472 |
| EP300 | 16.43 | 16.39 | 0.7457 |
| NFATC2 | 16.07 | 16.04 | 0.8309 |
| JUN | 20.86 | 20.90 | 0.8333 |
| EGR3 | 23.01 | 22.98 | 0.8957 |
| FGF2 | 24.57 | 24.59 | 0.9403 |
| MAPK1 | 14.71 | 14.71 | 0.9789 |

TABLE 5A

| | | | | | | | | Colon | | | total used | |
|---|---|---|---|---|---|---|---|---|---|---|---|---|
| | | | | | | | Normal | 23 | | | (excludes | |
| | | | | | | N = | 50 | Correct | | | missing) | |
| 2-gene models and | | Entropy | #normal | #normal | #cc | #cc | Correct | Classi- | | | | # |
| 1-gene models | | R-sq | Correct | FALSE | Correct | FALSE | Classification | fication | p-val 1 | p-val 2 | # normals | disease |
| AXIN2 | TNF | 0.62 | 46 | 3 | 19 | 2 | 93.9% | 90.5% | 9.0E−10 | 2.4E−05 | 49 | 21 |
| AXIN2 | ITGAL | 0.62 | 40 | 7 | 19 | 2 | 85.1% | 90.5% | 8.2E−13 | 3.2E−05 | 47 | 21 |
| AXIN2 | MTA1 | 0.61 | 43 | 4 | 19 | 2 | 91.5% | 90.5% | 7.7E−13 | 4.2E−05 | 47 | 21 |
| AXIN2 | CCL5 | 0.60 | 43 | 4 | 19 | 2 | 91.5% | 90.5% | 1.7E−09 | 7.0E−05 | 47 | 21 |
| AXIN2 | HMOX1 | 0.59 | 42 | 5 | 18 | 3 | 89.4% | 85.7% | 5.4E−10 | 0.0001 | 47 | 21 |
| AXIN2 | HOXA10 | 0.58 | 44 | 5 | 18 | 3 | 89.8% | 85.7% | 4.5E−11 | 0.0002 | 49 | 21 |
| AXIN2 | DIABLO | 0.56 | 43 | 6 | 18 | 3 | 87.8% | 85.7% | 4.1E−12 | 0.0004 | 49 | 21 |
| AXIN2 | HMGA1 | 0.56 | 43 | 6 | 18 | 3 | 87.8% | 85.7% | 5.1E−12 | 0.0004 | 49 | 21 |
| TNF | TNFSF5 | 0.55 | 42 | 5 | 18 | 3 | 89.4% | 85.7% | 1.9E−08 | 2.3E−08 | 47 | 21 |
| AXIN2 | SRF | 0.55 | 39 | 8 | 18 | 3 | 83.0% | 85.7% | 1.3E−11 | 0.0006 | 47 | 21 |
| AXIN2 | IKBKE | 0.55 | 40 | 7 | 18 | 3 | 85.1% | 85.7% | 1.2E−10 | 0.0006 | 47 | 21 |
| AXIN2 | IRF1 | 0.54 | 39 | 8 | 17 | 4 | 83.0% | 81.0% | 1.8E−10 | 0.0008 | 47 | 21 |
| HMOX1 | MSH6 | 0.54 | 41 | 5 | 18 | 3 | 89.1% | 85.7% | 3.3E−06 | 4.1E−09 | 46 | 21 |
| AXIN2 | C1QA | 0.54 | 38 | 9 | 17 | 4 | 80.9% | 81.0% | 5.1E−07 | 0.0008 | 47 | 21 |
| CCR7 | TNF | 0.53 | 48 | 2 | 20 | 3 | 96.0% | 87.0% | 8.8E−08 | 0.0001 | 50 | 23 |
| MSH6 | TNF | 0.53 | 39 | 8 | 17 | 4 | 83.0% | 81.0% | 4.9E−08 | 7.0E−06 | 47 | 21 |
| AXIN2 | TGFB1 | 0.53 | 44 | 5 | 18 | 3 | 89.8% | 85.7% | 2.5E−10 | 0.0020 | 49 | 21 |
| AXIN2 | BAX | 0.53 | 46 | 3 | 18 | 3 | 93.9% | 85.7% | 2.0E−11 | 0.0021 | 49 | 21 |
| AXIN2 | NRAS | 0.52 | 41 | 8 | 18 | 3 | 83.7% | 85.7% | 1.0E−10 | 0.0026 | 49 | 21 |
| AXIN2 | EGR1 | 0.52 | 44 | 5 | 18 | 3 | 89.8% | 85.7% | 2.1E−07 | 0.0030 | 49 | 21 |
| C1QA | MSH6 | 0.52 | 37 | 9 | 18 | 3 | 80.4% | 85.7% | 1.1E−05 | 1.6E−06 | 46 | 21 |
| AXIN2 | C1QB | 0.51 | 44 | 5 | 17 | 4 | 89.8% | 81.0% | 3.3E−06 | 0.0037 | 49 | 21 |
| CCL5 | TNFSF5 | 0.51 | 40 | 6 | 18 | 3 | 87.0% | 85.7% | 1.2E−07 | 6.6E−08 | 46 | 21 |
| CCL5 | MSH6 | 0.51 | 37 | 10 | 18 | 3 | 78.7% | 85.7% | 1.9E−05 | 8.9E−08 | 47 | 21 |
| AXIN2 | ST14 | 0.51 | 41 | 8 | 17 | 4 | 83.7% | 81.0% | 8.3E−11 | 0.0057 | 49 | 21 |
| AXIN2 | USP7 | 0.50 | 40 | 7 | 18 | 3 | 85.1% | 85.7% | 7.7E−11 | 0.0049 | 47 | 21 |
| AXIN2 | LARGE | 0.50 | 41 | 8 | 18 | 3 | 83.7% | 85.7% | 1.5E−10 | 0.0065 | 49 | 21 |
| AXIN2 | IFI16 | 0.50 | 41 | 6 | 17 | 4 | 87.2% | 81.0% | 1.5E−09 | 0.0058 | 47 | 21 |
| AXIN2 | MYC | 0.50 | 41 | 8 | 18 | 3 | 83.7% | 85.7% | 2.3E−10 | 0.0068 | 49 | 21 |
| CCL5 | CCR7 | 0.50 | 38 | 9 | 18 | 3 | 80.9% | 85.7% | 0.0003 | 1.2E−07 | 47 | 21 |
| MSH6 | NRAS | 0.50 | 41 | 6 | 18 | 3 | 87.2% | 85.7% | 4.0E−10 | 3.1E−05 | 47 | 21 |
| AXIN2 | MTF1 | 0.49 | 38 | 9 | 18 | 3 | 80.9% | 85.7% | 3.2E−10 | 0.0092 | 47 | 21 |
| CCR7 | HMOX1 | 0.49 | 40 | 7 | 18 | 3 | 85.1% | 85.7% | 4.2E−08 | 0.0005 | 47 | 21 |
| AXIN2 | CTSD | 0.49 | 40 | 9 | 18 | 3 | 81.6% | 85.7% | 1.4E−10 | 0.0134 | 49 | 21 |
| AXIN2 | IL8 | 0.49 | 41 | 8 | 18 | 3 | 83.7% | 85.7% | 7.4E−08 | 0.0135 | 49 | 21 |
| IRF1 | MSH6 | 0.49 | 37 | 9 | 17 | 4 | 80.4% | 81.0% | 3.8E−05 | 2.2E−09 | 46 | 21 |
| CCR7 | HMGA1 | 0.49 | 42 | 8 | 20 | 3 | 84.0% | 87.0% | 1.1E−10 | 0.0014 | 50 | 23 |
| AXIN2 | G6PD | 0.48 | 41 | 8 | 18 | 3 | 83.7% | 85.7% | 3.9E−10 | 0.0154 | 49 | 21 |
| AXIN2 | DAD1 | 0.48 | 39 | 10 | 17 | 4 | 79.6% | 81.0% | 1.4E−10 | 0.0169 | 49 | 21 |
| AXIN2 | IGF2BP2 | 0.48 | 43 | 6 | 18 | 3 | 87.8% | 85.7% | 2.7E−10 | 0.0176 | 49 | 21 |
| AXIN2 | IGFBP3 | 0.48 | 41 | 8 | 18 | 3 | 83.7% | 85.7% | 3.2E−10 | 0.0193 | 49 | 21 |
| AXIN2 | CASP9 | 0.48 | 39 | 8 | 18 | 3 | 83.0% | 85.7% | 2.3E−10 | 0.0170 | 47 | 21 |
| AXIN2 | NBEA | 0.48 | 45 | 4 | 17 | 4 | 91.8% | 81.0% | 1.8E−05 | 0.0219 | 49 | 21 |
| MSH6 | TGFB1 | 0.48 | 40 | 7 | 18 | 3 | 85.1% | 85.7% | 2.8E−09 | 7.2E−05 | 47 | 21 |
| AXIN2 | FOS | 0.48 | 41 | 7 | 17 | 4 | 85.4% | 81.0% | 4.5E−09 | 0.0259 | 48 | 21 |
| AXIN2 | MYD88 | 0.48 | 41 | 8 | 18 | 3 | 83.7% | 85.7% | 4.3E−10 | 0.0240 | 49 | 21 |
| AXIN2 | CD97 | 0.48 | 36 | 10 | 18 | 3 | 78.3% | 85.7% | 3.2E−10 | 0.0189 | 46 | 21 |
| CCL5 | LTA | 0.47 | 39 | 8 | 17 | 4 | 83.0% | 81.0% | 8.3E−09 | 3.6E−07 | 47 | 21 |
| ITGAL | MSH6 | 0.47 | 38 | 9 | 17 | 4 | 80.9% | 81.0% | 7.9E−05 | 3.7E−10 | 47 | 21 |
| AXIN2 | TIMP1 | 0.47 | 41 | 8 | 18 | 3 | 83.7% | 85.7% | 3.2E−09 | 0.0254 | 49 | 21 |
| AXIN2 | XK | 0.47 | 39 | 10 | 18 | 3 | 79.6% | 85.7% | 2.9E−10 | 0.0261 | 49 | 21 |
| C1QB | MSH6 | 0.47 | 36 | 11 | 17 | 4 | 76.6% | 81.0% | 0.0001 | 1.9E−05 | 47 | 21 |
| IFI16 | MSH6 | 0.47 | 39 | 8 | 17 | 4 | 83.0% | 81.0% | 0.0001 | 6.0E−09 | 47 | 21 |
| AXIN2 | ZNF185 | 0.47 | 40 | 7 | 17 | 4 | 85.1% | 81.0% | 5.0E−10 | 0.0285 | 47 | 21 |
| AXIN2 | S100A4 | 0.47 | 41 | 8 | 18 | 3 | 83.7% | 85.7% | 2.7E−10 | 0.0363 | 49 | 21 |
| AXIN2 | PLXDC2 | 0.47 | 43 | 6 | 17 | 4 | 87.8% | 81.0% | 6.2E−10 | 0.0377 | 49 | 21 |
| CNKSR2 | TNF | 0.47 | 44 | 5 | 18 | 3 | 89.8% | 85.7% | 9.7E−07 | 5.0E−05 | 49 | 21 |
| AXIN2 | GNB1 | 0.47 | 42 | 7 | 17 | 4 | 85.7% | 81.0% | 3.0E−10 | 0.0385 | 49 | 21 |
| AXIN2 | UBE2C | 0.47 | 38 | 9 | 17 | 4 | 80.9% | 81.0% | 1.0E−08 | 0.0312 | 47 | 21 |
| AXIN2 | VIM | 0.47 | 40 | 7 | 17 | 4 | 85.1% | 81.0% | 4.0E−10 | 0.0323 | 47 | 21 |
| AXIN2 | LGALS8 | 0.46 | 40 | 7 | 17 | 4 | 85.1% | 81.0% | 4.8E−10 | 0.0334 | 47 | 21 |
| CCR7 | EGR1 | 0.46 | 39 | 11 | 20 | 3 | 78.0% | 87.0% | 6.3E−06 | 0.0040 | 50 | 23 |
| CCR7 | IL8 | 0.46 | 42 | 8 | 19 | 4 | 84.0% | 82.6% | 1.2E−07 | 0.0044 | 50 | 23 |
| C1QA | ZNF350 | 0.46 | 38 | 9 | 17 | 4 | 80.9% | 81.0% | 4.1E−05 | 2.0E−05 | 47 | 21 |
| C1QB | ZNF350 | 0.46 | 38 | 11 | 17 | 4 | 77.6% | 81.0% | 5.8E−05 | 4.1E−05 | 49 | 21 |
| AXIN2 | CCL3 | 0.46 | 40 | 7 | 18 | 3 | 85.1% | 85.7% | 1.2E−09 | 0.0493 | 47 | 21 |
| AXIN2 | NUDT4 | 0.46 | 38 | 9 | 17 | 4 | 80.9% | 81.0% | 3.0E−09 | 0.0496 | 47 | 21 |
| CCR7 | HOXA10 | 0.46 | 42 | 7 | 17 | 4 | 85.7% | 81.0% | 1.2E−08 | 0.0027 | 49 | 21 |
| C1QB | CCR7 | 0.45 | 40 | 9 | 17 | 4 | 81.6% | 81.0% | 0.0029 | 5.0E−05 | 49 | 21 |
| CCR7 | TGFB1 | 0.45 | 43 | 7 | 20 | 3 | 86.0% | 87.0% | 7.7E−09 | 0.0068 | 50 | 23 |
| CCR7 | MYC | 0.45 | 41 | 9 | 18 | 5 | 82.0% | 78.3% | 3.9E−10 | 0.0081 | 50 | 23 |
| DIABLO | MSH6 | 0.45 | 37 | 10 | 17 | 4 | 78.7% | 81.0% | 0.0002 | 8.8E−10 | 47 | 21 |
| MSH6 | SRF | 0.45 | 39 | 7 | 17 | 4 | 84.8% | 81.0% | 1.2E−09 | 0.0002 | 46 | 21 |
| CCR7 | IRF1 | 0.45 | 39 | 8 | 17 | 4 | 83.0% | 81.0% | 1.1E−08 | 0.0030 | 47 | 21 |
| HMOX1 | ZNF350 | 0.45 | 37 | 10 | 18 | 3 | 78.7% | 85.7% | 7.7E−05 | 2.7E−07 | 47 | 21 |
| MSH6 | MTF1 | 0.44 | 38 | 9 | 17 | 4 | 80.9% | 81.0% | 2.5E−09 | 0.0003 | 47 | 21 |
| BAX | MSH6 | 0.44 | 40 | 7 | 17 | 4 | 85.1% | 81.0% | 0.0004 | 1.2E−09 | 47 | 21 |
| CCR7 | TIMP1 | 0.44 | 42 | 8 | 19 | 4 | 84.0% | 82.6% | 1.0E−08 | 0.0135 | 50 | 23 |
| CCR7 | NRAS | 0.44 | 39 | 11 | 18 | 5 | 78.0% | 78.3% | 3.2E−09 | 0.0155 | 50 | 23 |
| CCR7 | ITGAL | 0.44 | 37 | 10 | 17 | 4 | 78.7% | 81.0% | 1.9E−09 | 0.0051 | 47 | 21 |
| GSK3B | S100A11 | 0.43 | 39 | 8 | 17 | 4 | 83.0% | 81.0% | 9.1E−09 | 1.7E−07 | 47 | 21 |
| GSK3B | TNF | 0.43 | 41 | 8 | 18 | 3 | 83.7% | 85.7% | 4.6E−06 | 1.6E−07 | 49 | 21 |
| CNKSR2 | HMOX1 | 0.43 | 39 | 8 | 18 | 3 | 83.0% | 85.7% | 5.4E−07 | 0.0002 | 47 | 21 |
| HMOX1 | TNFSF5 | 0.43 | 37 | 10 | 18 | 3 | 78.7% | 85.7% | 4.1E−06 | 5.5E−07 | 47 | 21 |
| CCL5 | CNKSR2 | 0.43 | 41 | 6 | 18 | 3 | 87.2% | 85.7% | 0.0003 | 2.7E−06 | 47 | 21 |
| CCR7 | ZNF350 | 0.43 | 43 | 6 | 17 | 4 | 87.8% | 81.0% | 0.0002 | 0.0095 | 49 | 21 |
| APC | C1QB | 0.43 | 37 | 12 | 17 | 4 | 75.5% | 81.0% | 0.0002 | 3.8E−06 | 49 | 21 |
| NRAS | ZNF350 | 0.43 | 40 | 9 | 18 | 3 | 81.6% | 85.7% | 0.0003 | 7.1E−09 | 49 | 21 |
| MSH6 | MTA1 | 0.43 | 36 | 11 | 17 | 4 | 76.6% | 81.0% | 2.2E−09 | 0.0007 | 47 | 21 |
| CCR7 | SPARC | 0.43 | 38 | 9 | 17 | 4 | 80.9% | 81.0% | 6.8E−06 | 0.0085 | 47 | 21 |
| APC | HMOX1 | 0.42 | 40 | 7 | 17 | 4 | 85.1% | 81.0% | 7.0E−07 | 3.1E−06 | 47 | 21 |
| C1QA | MLH1 | 0.42 | 39 | 7 | 17 | 4 | 84.8% | 81.0% | 2.0E−07 | 9.2E−05 | 46 | 21 |
| HOXA10 | MSH6 | 0.42 | 40 | 7 | 18 | 3 | 85.1% | 85.7% | 0.0009 | 5.2E−08 | 47 | 21 |
| C1QA | TNFSF5 | 0.42 | 40 | 7 | 18 | 3 | 85.1% | 85.7% | 6.0E−06 | 0.0001 | 47 | 21 |
| CCR7 | SRF | 0.42 | 40 | 7 | 17 | 4 | 85.1% | 81.0% | 3.7E−09 | 0.0110 | 47 | 21 |
| APC | C1QA | 0.42 | 38 | 9 | 17 | 4 | 80.9% | 81.0% | 0.0001 | 3.8E−06 | 47 | 21 |
| CCR7 | MYD88 | 0.42 | 39 | 11 | 18 | 5 | 78.0% | 78.3% | 2.1E−09 | 0.0397 | 50 | 23 |
| CCR7 | G6PD | 0.42 | 39 | 11 | 18 | 5 | 78.0% | 78.3% | 5.4E−09 | 0.0397 | 50 | 23 |
| MSH6 | S100A4 | 0.42 | 41 | 6 | 18 | 3 | 87.2% | 85.7% | 3.1E−09 | 0.0010 | 47 | 21 |
| TNF | ZNF350 | 0.42 | 38 | 11 | 16 | 5 | 77.6% | 76.2% | 0.0004 | 8.4E−06 | 49 | 21 |
| CCR7 | SERPINE1 | 0.42 | 43 | 7 | 20 | 3 | 86.0% | 87.0% | 7.1E−09 | 0.0419 | 50 | 23 |
| IFI16 | ZNF350 | 0.42 | 40 | 7 | 18 | 3 | 85.1% | 85.7% | 0.0003 | 5.8E−08 | 47 | 21 |
| AXIN2 | | 0.42 | 41 | 8 | 17 | 4 | 83.7% | 81.0% | 2.4E−09 | | 49 | 21 |
| CASP9 | MSH6 | 0.42 | 39 | 8 | 17 | 4 | 83.0% | 81.0% | 0.0011 | 3.5E−09 | 47 | 21 |
| MSH6 | TIMP1 | 0.41 | 37 | 10 | 16 | 5 | 78.7% | 76.2% | 5.7E−08 | 0.0013 | 47 | 21 |
| APC | TNFRSF1A | 0.41 | 40 | 9 | 17 | 4 | 81.6% | 81.0% | 6.1E−09 | 7.0E−06 | 49 | 21 |
| GSK3B | PLXDC2 | 0.41 | 40 | 9 | 17 | 4 | 81.6% | 81.0% | 6.9E−09 | 3.8E−07 | 49 | 21 |
| C1QB | GSK3B | 0.41 | 38 | 11 | 17 | 4 | 77.6% | 81.0% | 3.8E−07 | 0.0003 | 49 | 21 |
| MLH1 | TNF | 0.41 | 37 | 10 | 17 | 4 | 78.7% | 81.0% | 8.7E−06 | 3.9E−07 | 47 | 21 |
| CCR7 | IFI16 | 0.41 | 38 | 9 | 17 | 4 | 80.9% | 81.0% | 8.0E−08 | 0.0181 | 47 | 21 |
| CCR7 | DIABLO | 0.41 | 37 | 12 | 16 | 5 | 75.5% | 76.2% | 3.9E−09 | 0.0265 | 49 | 21 |
| CCR7 | USP7 | 0.41 | 38 | 9 | 16 | 5 | 80.9% | 76.2% | 5.5E−09 | 0.0219 | 47 | 21 |
| IRF1 | ZNF350 | 0.41 | 39 | 8 | 18 | 3 | 83.0% | 85.7% | 0.0005 | 7.1E−08 | 47 | 21 |
| HMOX1 | MLH1 | 0.40 | 39 | 7 | 18 | 3 | 84.8% | 85.7% | 4.4E−07 | 1.6E−06 | 46 | 21 |
| MSH6 | MYD88 | 0.40 | 37 | 10 | 16 | 5 | 78.7% | 76.2% | 1.3E−08 | 0.0019 | 47 | 21 |
| APC | IRF1 | 0.40 | 39 | 8 | 17 | 4 | 83.0% | 81.0% | 7.6E−08 | 7.6E−06 | 47 | 21 |
| CCR7 | E2F1 | 0.40 | 41 | 6 | 17 | 4 | 87.2% | 81.0% | 3.5E−06 | 0.0248 | 47 | 21 |
| TNFRSF1A | ZNF350 | 0.40 | 40 | 9 | 17 | 4 | 81.6% | 81.0% | 0.0008 | 9.6E−09 | 49 | 21 |
| G6PD | MSH6 | 0.40 | 38 | 9 | 17 | 4 | 80.9% | 81.0% | 0.0021 | 2.1E−08 | 47 | 21 |
| C1QA | TXNRD1 | 0.40 | 37 | 10 | 18 | 3 | 78.7% | 85.7% | 2.1E−07 | 0.0003 | 47 | 21 |
| MAPK14 | MSH6 | 0.40 | 36 | 11 | 16 | 5 | 76.6% | 76.2% | 0.0024 | 8.3E−09 | 47 | 21 |
| C1QA | GSK3B | 0.40 | 39 | 8 | 17 | 4 | 83.0% | 81.0% | 5.8E−07 | 0.0003 | 47 | 21 |
| TNF | XRCC1 | 0.40 | 43 | 6 | 17 | 4 | 87.8% | 81.0% | 2.2E−08 | 2.0E−05 | 49 | 21 |
| MSH6 | USP7 | 0.40 | 37 | 9 | 17 | 4 | 80.4% | 81.0% | 9.1E−09 | 0.0021 | 46 | 21 |
| NBEA | TNF | 0.40 | 40 | 9 | 17 | 4 | 81.6% | 81.0% | 2.2E−05 | 0.0007 | 49 | 21 |
| MSH2 | TNF | 0.40 | 42 | 8 | 20 | 3 | 84.0% | 87.0% | 6.1E−05 | 0.0012 | 50 | 23 |
| CCR7 | ING2 | 0.40 | 37 | 12 | 17 | 4 | 75.5% | 81.0% | 3.5E−06 | 0.0487 | 49 | 21 |
| C1QB | TXNRD1 | 0.39 | 38 | 9 | 17 | 4 | 80.9% | 81.0% | 2.7E−07 | 0.0007 | 47 | 21 |
| HMOX1 | MSH2 | 0.39 | 41 | 6 | 18 | 3 | 87.2% | 85.7% | 0.0002 | 2.6E−06 | 47 | 21 |
| MSH6 | UBE2C | 0.39 | 37 | 9 | 16 | 5 | 80.4% | 76.2% | 2.2E−07 | 0.0024 | 46 | 21 |
| APC | TNF | 0.39 | 39 | 10 | 17 | 4 | 79.6% | 81.0% | 2.5E−05 | 1.6E−05 | 49 | 21 |
| CCR7 | MTF1 | 0.39 | 37 | 10 | 16 | 5 | 78.7% | 76.2% | 2.3E−08 | 0.0404 | 47 | 21 |
| DAD1 | MSH6 | 0.39 | 39 | 8 | 17 | 4 | 83.0% | 81.0% | 0.0033 | 1.1E−08 | 47 | 21 |
| GSK3B | HMOX1 | 0.39 | 38 | 9 | 17 | 4 | 80.9% | 81.0% | 2.9E−06 | 8.1E−07 | 47 | 21 |
| MYD88 | ZNF350 | 0.39 | 39 | 10 | 16 | 5 | 79.6% | 76.2% | 0.0013 | 1.9E−08 | 49 | 21 |
| LTA | TNF | 0.39 | 37 | 10 | 16 | 5 | 78.7% | 76.2% | 2.2E−05 | 3.4E−07 | 47 | 21 |
| C1QA | MSH2 | 0.39 | 37 | 10 | 17 | 4 | 78.7% | 81.0% | 0.0003 | 0.0005 | 47 | 21 |
| MSH6 | PLXDC2 | 0.39 | 36 | 11 | 17 | 4 | 76.6% | 81.0% | 2.5E−08 | 0.0038 | 47 | 21 |
| CTSD | MSH6 | 0.39 | 37 | 10 | 17 | 4 | 78.7% | 81.0% | 0.0039 | 1.4E−08 | 47 | 21 |
| APC | S100A11 | 0.39 | 37 | 10 | 16 | 5 | 78.7% | 76.2% | 6.9E−08 | 2.0E−05 | 47 | 21 |
| CD59 | ZNF350 | 0.39 | 42 | 7 | 18 | 3 | 85.7% | 85.7% | 0.0015 | 3.1E−08 | 49 | 21 |
| C1QB | TNFSF5 | 0.39 | 40 | 7 | 17 | 4 | 85.1% | 81.0% | 2.8E−05 | 0.0010 | 47 | 21 |
| C1QA | CNKSR2 | 0.38 | 39 | 8 | 18 | 3 | 83.0% | 85.7% | 0.0016 | 0.0006 | 47 | 21 |
| C1QB | NBEA | 0.38 | 39 | 10 | 17 | 4 | 79.6% | 81.0% | 0.0013 | 0.0012 | 49 | 21 |
| C1QB | MLH1 | 0.38 | 37 | 10 | 17 | 4 | 78.7% | 81.0% | 1.2E−06 | 0.0008 | 47 | 21 |
| MSH6 | RBM5 | 0.38 | 38 | 9 | 17 | 4 | 80.9% | 81.0% | 4.8E−08 | 0.0050 | 47 | 21 |
| MAPK14 | ZNF350 | 0.38 | 36 | 11 | 17 | 4 | 76.6% | 81.0% | 0.0015 | 1.7E−08 | 47 | 21 |
| TLR2 | ZNF350 | 0.38 | 41 | 6 | 17 | 4 | 87.2% | 81.0% | 0.0014 | 2.1E−08 | 47 | 21 |
| MSH6 | TLR2 | 0.38 | 37 | 9 | 16 | 5 | 80.4% | 76.2% | 2.5E−08 | 0.0045 | 46 | 21 |
| FOS | MSH6 | 0.38 | 35 | 11 | 16 | 5 | 76.1% | 76.2% | 0.0049 | 4.5E−07 | 46 | 21 |
| MSH6 | TNFRSF1A | 0.38 | 37 | 10 | 16 | 5 | 78.7% | 76.2% | 3.5E−08 | 0.0058 | 47 | 21 |
| MSH2 | TGFB1 | 0.38 | 43 | 7 | 19 | 4 | 86.0% | 82.6% | 2.4E−07 | 0.0027 | 50 | 23 |
| APC | IFI16 | 0.38 | 37 | 10 | 16 | 5 | 78.7% | 76.2% | 3.0E−07 | 2.8E−05 | 47 | 21 |
| MSH6 | S100A11 | 0.38 | 38 | 9 | 17 | 4 | 80.9% | 81.0% | 9.9E−08 | 0.0061 | 47 | 21 |
| C1QB | CNKSR2 | 0.38 | 37 | 12 | 18 | 3 | 75.5% | 85.7% | 0.0028 | 0.0016 | 49 | 21 |
| CCL5 | XRCC1 | 0.38 | 38 | 9 | 17 | 4 | 80.9% | 81.0% | 7.1E−08 | 2.6E−05 | 47 | 21 |
| APC | MAPK14 | 0.38 | 39 | 8 | 16 | 5 | 83.0% | 76.2% | 2.2E−08 | 3.1E−05 | 47 | 21 |
| APC | PLXDC2 | 0.38 | 38 | 11 | 16 | 5 | 77.6% | 76.2% | 3.2E−08 | 3.4E−05 | 49 | 21 |
| CA4 | MSH6 | 0.38 | 36 | 10 | 16 | 5 | 78.3% | 76.2% | 0.0054 | 3.4E−07 | 46 | 21 |
| CNKSR2 | ZNF350 | 0.38 | 38 | 11 | 17 | 4 | 77.6% | 81.0% | 0.0025 | 0.0032 | 49 | 21 |
| CNKSR2 | HMGA1 | 0.38 | 42 | 7 | 18 | 3 | 85.7% | 85.7% | 1.9E−08 | 0.0032 | 49 | 21 |
| C1QB | ING2 | 0.37 | 37 | 12 | 16 | 5 | 75.5% | 76.2% | 9.3E−06 | 0.0019 | 49 | 21 |
| HMOX1 | IKBKE | 0.37 | 39 | 8 | 17 | 4 | 83.0% | 81.0% | 2.6E−07 | 6.5E−06 | 47 | 21 |
| CA4 | ZNF350 | 0.37 | 36 | 11 | 17 | 4 | 76.6% | 81.0% | 0.0021 | 3.2E−07 | 47 | 21 |
| HMOX1 | TXNRD1 | 0.37 | 37 | 10 | 17 | 4 | 78.7% | 81.0% | 7.2E−07 | 6.6E−06 | 47 | 21 |
| CCR7 | | 0.37 | 39 | 11 | 18 | 5 | 78.0% | 78.3% | 5.9E−09 | | 50 | 23 |
| CCL5 | MLH1 | 0.37 | 39 | 8 | 17 | 4 | 83.0% | 81.0% | 2.1E−06 | 3.3E−05 | 47 | 21 |
| G6PD | GSK3B | 0.37 | 39 | 10 | 16 | 5 | 79.6% | 76.2% | 2.4E−06 | 5.9E−08 | 49 | 21 |
| MSH6 | NBEA | 0.37 | 36 | 11 | 17 | 4 | 76.6% | 81.0% | 0.0020 | 0.0091 | 47 | 21 |
| C1QB | MSH2 | 0.37 | 38 | 11 | 17 | 4 | 77.6% | 81.0% | 0.0009 | 0.0023 | 49 | 21 |
| MSH6 | SPARC | 0.37 | 35 | 11 | 16 | 5 | 76.1% | 76.2% | 6.8E−05 | 0.0075 | 46 | 21 |
| TGFB1 | ZNF350 | 0.37 | 40 | 9 | 17 | 4 | 81.6% | 81.0% | 0.0034 | 2.7E−07 | 49 | 21 |
| C1QA | NBEA | 0.37 | 37 | 10 | 16 | 5 | 78.7% | 76.2% | 0.0024 | 0.0012 | 47 | 21 |
| CNKSR2 | IL8 | 0.37 | 40 | 9 | 17 | 4 | 81.6% | 81.0% | 1.7E−05 | 0.0053 | 49 | 21 |
| CNKSR2 | NRAS | 0.36 | 40 | 9 | 18 | 3 | 81.6% | 85.7% | 1.1E−07 | 0.0055 | 49 | 21 |
| APC | TGFB1 | 0.36 | 42 | 7 | 17 | 4 | 85.7% | 81.0% | 3.4E−07 | 6.1E−05 | 49 | 21 |
| MSH6 | ST14 | 0.36 | 38 | 9 | 17 | 4 | 80.9% | 81.0% | 5.5E−08 | 0.0131 | 47 | 21 |
| GSK3B | TIMP1 | 0.36 | 39 | 10 | 17 | 4 | 79.6% | 81.0% | 4.6E−07 | 3.5E−06 | 49 | 21 |
| EGR1 | TNFSF5 | 0.36 | 38 | 9 | 16 | 5 | 80.9% | 76.2% | 8.0E−05 | 0.0002 | 47 | 21 |
| CD97 | MSH6 | 0.36 | 37 | 9 | 16 | 5 | 80.4% | 76.2% | 0.0108 | 4.0E−08 | 46 | 21 |
| MTF1 | ZNF350 | 0.36 | 36 | 11 | 16 | 5 | 76.6% | 76.2% | 0.0040 | 8.8E−08 | 47 | 21 |
| FOS | ZNF350 | 0.36 | 39 | 9 | 17 | 4 | 81.3% | 81.0% | 0.0040 | 6.7E−07 | 48 | 21 |
| ADAM17 | C1QA | 0.36 | 38 | 8 | 17 | 4 | 82.6% | 81.0% | 0.0014 | 1.6E−06 | 46 | 21 |
| TNF | TXNRD1 | 0.36 | 36 | 11 | 17 | 4 | 76.6% | 81.0% | 1.2E−06 | 1.0E−04 | 47 | 21 |
| MSH6 | VIM | 0.36 | 36 | 10 | 16 | 5 | 78.3% | 76.2% | 4.2E−08 | 0.0112 | 46 | 21 |
| CNKSR2 | SPARC | 0.36 | 41 | 6 | 17 | 4 | 87.2% | 81.0% | 0.0001 | 0.0048 | 47 | 21 |
| E2F1 | MSH6 | 0.36 | 36 | 10 | 16 | 5 | 78.3% | 76.2% | 0.0116 | 1.9E−05 | 46 | 21 |
| APC | MYD88 | 0.36 | 40 | 9 | 17 | 4 | 81.6% | 81.0% | 6.9E−08 | 7.2E−05 | 49 | 21 |
| HMOX1 | XRCC1 | 0.36 | 37 | 10 | 16 | 5 | 78.7% | 76.2% | 1.4E−07 | 1.2E−05 | 47 | 21 |
| PLXDC2 | ZNF350 | 0.36 | 39 | 10 | 16 | 5 | 79.6% | 76.2% | 0.0054 | 6.9E−08 | 49 | 21 |
| NBEA | SPARC | 0.36 | 39 | 8 | 18 | 3 | 83.0% | 85.7% | 0.0001 | 0.0038 | 47 | 21 |
| CNKSR2 | EGR1 | 0.36 | 43 | 6 | 18 | 3 | 87.8% | 85.7% | 0.0003 | 0.0075 | 49 | 21 |
| HMGA1 | MSH6 | 0.36 | 37 | 10 | 17 | 4 | 78.7% | 81.0% | 0.0180 | 5.5E−08 | 47 | 21 |
| CNKSR2 | NBEA | 0.35 | 38 | 11 | 16 | 5 | 77.6% | 76.2% | 0.0054 | 0.0091 | 49 | 21 |
| EGR1 | ZNF350 | 0.35 | 39 | 10 | 17 | 4 | 79.6% | 81.0% | 0.0074 | 0.0004 | 49 | 21 |
| APC | G6PD | 0.35 | 39 | 10 | 16 | 5 | 79.6% | 76.2% | 1.3E−07 | 0.0001004 | 49 | 21 |
| CNKSR2 | IRF1 | 0.35 | 39 | 8 | 17 | 4 | 83.0% | 81.0% | 6.9E−07 | 0.0069 | 47 | 21 |
| MSH6 | XK | 0.35 | 37 | 10 | 17 | 4 | 78.7% | 81.0% | 8.5E−08 | 0.0228 | 47 | 21 |
| C1QB | LTA | 0.35 | 39 | 8 | 17 | 4 | 83.0% | 81.0% | 1.9E−06 | 0.0040 | 47 | 21 |
| MSH6 | SERPINE1 | 0.35 | 36 | 11 | 16 | 5 | 76.6% | 76.2% | 3.9E−07 | 0.0239 | 47 | 21 |
| MSH2 | NRAS | 0.35 | 39 | 11 | 19 | 4 | 78.0% | 82.6% | 1.9E−07 | 0.0122 | 50 | 23 |
| APC | CA4 | 0.35 | 37 | 10 | 16 | 5 | 78.7% | 76.2% | 8.8E−07 | 8.3E−05 | 47 | 21 |
| BAX | MSH2 | 0.35 | 38 | 12 | 19 | 4 | 76.0% | 82.6% | 0.0125 | 2.3E−08 | 50 | 23 |
| HOXA10 | ZNF350 | 0.35 | 39 | 10 | 16 | 5 | 79.6% | 76.2% | 0.0090 | 1.3E−06 | 49 | 21 |
| EGR1 | NBEA | 0.35 | 41 | 8 | 16 | 5 | 83.7% | 76.2% | 0.0067 | 0.0004 | 49 | 21 |
| BCAM | MSH6 | 0.35 | 38 | 8 | 17 | 4 | 82.6% | 81.0% | 0.0205 | 9.9E−08 | 46 | 21 |
| CAV1 | MSH6 | 0.35 | 37 | 10 | 17 | 4 | 78.7% | 81.0% | 0.0266 | 2.4E−06 | 47 | 21 |
| SIAH2 | XK | 0.35 | 37 | 10 | 17 | 4 | 78.7% | 81.0% | 1.1E−07 | 2.7E−05 | 47 | 21 |
| APC | TLR2 | 0.35 | 40 | 7 | 18 | 3 | 85.1% | 85.7% | 9.7E−08 | 9.8E−05 | 47 | 21 |
| CCL5 | ZNF350 | 0.35 | 37 | 10 | 16 | 5 | 78.7% | 76.2% | 0.0086 | 0.0001 | 47 | 21 |
| APC | FOS | 0.35 | 38 | 10 | 17 | 4 | 79.2% | 81.0% | 1.4E−06 | 0.0001 | 48 | 21 |
| MSH6 | PLAU | 0.34 | 36 | 11 | 16 | 5 | 76.6% | 76.2% | 7.7E−08 | 0.0313 | 47 | 21 |
| MSH6 | RP51077B9.4 | 0.34 | 36 | 11 | 16 | 5 | 76.6% | 76.2% | 1.8E−06 | 0.0318 | 47 | 21 |
| NBEA | ZNF350 | 0.34 | 39 | 10 | 16 | 5 | 79.6% | 76.2% | 0.0115 | 0.0085 | 49 | 21 |
| ADAM17 | HMOX1 | 0.34 | 36 | 10 | 16 | 5 | 78.3% | 76.2% | 2.3E−05 | 3.6E−06 | 46 | 21 |
| CNKSR2 | E2F1 | 0.34 | 37 | 10 | 17 | 4 | 78.7% | 81.0% | 4.8E−05 | 0.0107 | 47 | 21 |
| GSK3B | TGFB1 | 0.34 | 40 | 9 | 16 | 5 | 81.6% | 76.2% | 8.8E−07 | 8.5E−06 | 49 | 21 |
| CNKSR2 | HOXA10 | 0.34 | 43 | 6 | 17 | 4 | 87.8% | 81.0% | 1.7E−06 | 0.0160 | 49 | 21 |
| MSH2 | S100A4 | 0.34 | 41 | 9 | 19 | 4 | 82.0% | 82.6% | 3.4E−08 | 0.0191 | 50 | 23 |
| ETS2 | MSH6 | 0.34 | 36 | 11 | 16 | 5 | 76.6% | 76.2% | 0.0380 | 1.1E−07 | 47 | 21 |
| MNDA | MSH6 | 0.34 | 38 | 9 | 17 | 4 | 80.9% | 81.0% | 0.0389 | 1.0E−07 | 47 | 21 |
| MSH6 | SERPINA1 | 0.34 | 37 | 10 | 16 | 5 | 78.7% | 76.2% | 9.1E−08 | 0.0389 | 47 | 21 |
| C1QB | CEACAM1 | 0.34 | 39 | 10 | 17 | 4 | 79.6% | 81.0% | 1.4E−07 | 0.0094 | 49 | 21 |
| CNKSR2 | TGFB1 | 0.34 | 41 | 8 | 18 | 3 | 83.7% | 85.7% | 9.9E−07 | 0.0175 | 49 | 21 |
| CNKSR2 | MSH6 | 0.34 | 38 | 9 | 17 | 4 | 80.9% | 81.0% | 0.0405 | 0.0153 | 47 | 21 |
| APC | MTF1 | 0.34 | 36 | 11 | 16 | 5 | 76.6% | 76.2% | 2.4E−07 | 0.0002 | 47 | 21 |
| C1QA | IKBKE | 0.34 | 36 | 11 | 16 | 5 | 76.6% | 76.2% | 1.1E−06 | 0.0045 | 47 | 21 |
| G6PD | ZNF350 | 0.34 | 39 | 10 | 16 | 5 | 79.6% | 76.2% | 0.0147 | 2.4E−07 | 49 | 21 |
| HOXA10 | TNFSF5 | 0.34 | 38 | 9 | 17 | 4 | 80.9% | 81.0% | 0.0002 | 2.2E−06 | 47 | 21 |
| PTPRK | TNF | 0.34 | 39 | 11 | 19 | 4 | 78.0% | 82.6% | 0.0010 | 2.0E−06 | 50 | 23 |
| IQGAP1 | TNF | 0.34 | 39 | 11 | 18 | 5 | 78.0% | 78.3% | 0.0010 | 8.3E−08 | 50 | 23 |
| MSH2 | NBEA | 0.34 | 38 | 11 | 16 | 5 | 77.6% | 76.2% | 0.0113 | 0.0038 | 49 | 21 |
| IRF1 | MSH2 | 0.34 | 36 | 11 | 16 | 5 | 76.6% | 76.2% | 0.0032 | 1.3E−06 | 47 | 21 |
| CCL5 | IKBKE | 0.34 | 36 | 10 | 17 | 4 | 78.3% | 81.0% | 1.9E−06 | 0.0001 | 46 | 21 |
| CNKSR2 | IFI16 | 0.34 | 39 | 8 | 17 | 4 | 83.0% | 81.0% | 1.9E−06 | 0.0168 | 47 | 21 |
| CCL3 | MSH6 | 0.34 | 35 | 11 | 16 | 5 | 76.1% | 76.2% | 0.0349 | 2.1E−07 | 46 | 21 |
| IL8 | MSH6 | 0.34 | 39 | 8 | 17 | 4 | 83.0% | 81.0% | 0.0457 | 4.9E−05 | 47 | 21 |
| GSK3B | MAPK14 | 0.34 | 37 | 10 | 17 | 4 | 78.7% | 81.0% | 1.3E−07 | 1.2E−05 | 47 | 21 |
| MMP9 | MSH6 | 0.34 | 37 | 10 | 17 | 4 | 78.7% | 81.0% | 0.0469 | 2.7E−07 | 47 | 21 |
| CNKSR2 | MSH2 | 0.34 | 38 | 11 | 17 | 4 | 77.6% | 81.0% | 0.0041 | 0.0211 | 49 | 21 |
| CA4 | MME | 0.34 | 38 | 9 | 16 | 5 | 80.9% | 76.2% | 1.2E−06 | 1.6E−06 | 47 | 21 |
| EGR1 | MSH2 | 0.34 | 39 | 11 | 19 | 4 | 78.0% | 82.6% | 0.0251 | 0.0031 | 50 | 23 |
| IKBKE | TNF | 0.33 | 41 | 6 | 16 | 5 | 87.2% | 76.2% | 0.0003 | 1.4E−06 | 47 | 21 |
| NBEA | SIAH2 | 0.33 | 37 | 10 | 16 | 5 | 78.7% | 76.2% | 4.7E−05 | 0.0116 | 47 | 21 |
| CNKSR2 | MYC | 0.33 | 44 | 5 | 17 | 4 | 89.8% | 81.0% | 4.0E−07 | 0.0251 | 49 | 21 |
| SRF | ZNF350 | 0.33 | 37 | 10 | 16 | 5 | 78.7% | 76.2% | 0.0138 | 1.7E−07 | 47 | 21 |
| SPARC | TNFSF5 | 0.33 | 38 | 9 | 17 | 4 | 80.9% | 81.0% | 0.0003 | 0.0005 | 47 | 21 |
| GSK3B | TNFRSF1A | 0.33 | 39 | 10 | 17 | 4 | 79.6% | 81.0% | 2.3E−07 | 1.5E−05 | 49 | 21 |
| CCL5 | NBEA | 0.33 | 36 | 11 | 17 | 4 | 76.6% | 81.0% | 0.0134 | 0.0002 | 47 | 21 |
| CAV1 | ZNF350 | 0.33 | 39 | 10 | 17 | 4 | 79.6% | 81.0% | 0.0228 | 4.6E−06 | 49 | 21 |
| CNKSR2 | MTA1 | 0.33 | 39 | 8 | 17 | 4 | 83.0% | 81.0% | 1.4E−07 | 0.0244 | 47 | 21 |
| LGALS8 | ZNF350 | 0.33 | 37 | 10 | 16 | 5 | 78.7% | 76.2% | 0.0181 | 1.7E−07 | 47 | 21 |
| APC | NRAS | 0.33 | 42 | 7 | 16 | 5 | 85.7% | 76.2% | 5.1E−07 | 0.0003 | 49 | 21 |
| ADAM17 | TNF | 0.33 | 36 | 11 | 16 | 5 | 76.6% | 76.2% | 0.0003 | 7.3E−06 | 47 | 21 |
| GNB1 | TNF | 0.33 | 43 | 6 | 17 | 4 | 87.8% | 81.0% | 0.0005 | 1.3E−07 | 49 | 21 |
| MNDA | ZNF350 | 0.33 | 36 | 11 | 16 | 5 | 76.6% | 76.2% | 0.0193 | 1.7E−07 | 47 | 21 |
| ETS2 | ZNF350 | 0.33 | 37 | 12 | 16 | 5 | 75.5% | 76.2% | 0.0255 | 1.5E−07 | 49 | 21 |
| CTSD | ZNF350 | 0.33 | 38 | 11 | 16 | 5 | 77.6% | 76.2% | 0.0255 | 1.6E−07 | 49 | 21 |
| APC | CNKSR2 | 0.33 | 38 | 11 | 17 | 4 | 77.6% | 81.0% | 0.0323 | 0.0003 | 49 | 21 |
| ETS2 | GSK3B | 0.33 | 38 | 11 | 16 | 5 | 77.6% | 76.2% | 1.7E−05 | 1.5E−07 | 49 | 21 |
| SPARC | ZNF350 | 0.33 | 38 | 9 | 16 | 5 | 80.9% | 76.2% | 0.0169 | 0.0005 | 47 | 21 |
| CNKSR2 | SERPING1 | 0.33 | 39 | 10 | 17 | 4 | 79.6% | 81.0% | 1.0E−06 | 0.0331 | 49 | 21 |
| G6PD | MSH2 | 0.33 | 43 | 7 | 18 | 5 | 86.0% | 78.3% | 0.0405 | 4.1E−07 | 50 | 23 |
| C1QB | IL8 | 0.33 | 41 | 8 | 18 | 3 | 83.7% | 85.7% | 9.7E−05 | 0.0182 | 49 | 21 |
| C1QA | LGALS8 | 0.33 | 38 | 8 | 17 | 4 | 82.6% | 81.0% | 2.1E−07 | 0.0072 | 46 | 21 |
| CNKSR2 | ITGAL | 0.33 | 38 | 9 | 17 | 4 | 80.9% | 81.0% | 2.4E−07 | 0.0299 | 47 | 21 |
| FOS | MSH2 | 0.32 | 40 | 9 | 19 | 4 | 81.6% | 82.6% | 0.0436 | 2.1E−06 | 49 | 23 |
| UBE2C | ZNF350 | 0.32 | 38 | 9 | 17 | 4 | 80.9% | 81.0% | 0.0192 | 4.7E−06 | 47 | 21 |
| IL8 | MSH2 | 0.32 | 39 | 11 | 18 | 5 | 78.0% | 78.3% | 0.0448 | 8.0E−05 | 50 | 23 |
| HMOX1 | RBM5 | 0.32 | 39 | 7 | 17 | 4 | 84.8% | 81.0% | 6.0E−07 | 5.3E−05 | 46 | 21 |
| CNKSR2 | ING2 | 0.32 | 39 | 10 | 17 | 4 | 79.6% | 81.0% | 8.5E−05 | 0.0381 | 49 | 21 |
| APC | EGR1 | 0.32 | 41 | 8 | 17 | 4 | 83.7% | 81.0% | 0.0013 | 0.0004 | 49 | 21 |
| APC | SERPINA1 | 0.32 | 36 | 11 | 16 | 5 | 76.6% | 76.2% | 2.1E−07 | 0.0004 | 47 | 21 |
| E2F1 | ZNF350 | 0.32 | 36 | 11 | 16 | 5 | 76.6% | 76.2% | 0.0229 | 0.0001 | 47 | 21 |
| C1QB | PTEN | 0.32 | 38 | 11 | 16 | 5 | 77.6% | 76.2% | 8.6E−07 | 0.0234 | 49 | 21 |
| CNKSR2 | DIABLO | 0.32 | 38 | 11 | 17 | 4 | 77.6% | 81.0% | 1.8E−07 | 0.0457 | 49 | 21 |
| ST14 | ZNF350 | 0.32 | 37 | 12 | 16 | 5 | 75.5% | 76.2% | 0.0359 | 2.8E−07 | 49 | 21 |
| IFI16 | TXNRD1 | 0.32 | 39 | 7 | 16 | 5 | 84.8% | 76.2% | 7.3E−06 | 4.9E−06 | 46 | 21 |
| CAV1 | CNKSR2 | 0.32 | 39 | 10 | 16 | 5 | 79.6% | 76.2% | 0.0480 | 7.3E−06 | 49 | 21 |
| CTNNA1 | ZNF350 | 0.32 | 37 | 12 | 16 | 5 | 75.5% | 76.2% | 0.0378 | 2.3E−07 | 49 | 21 |
| CCL5 | PTPRK | 0.32 | 39 | 8 | 17 | 4 | 83.0% | 81.0% | 6.8E−06 | 0.0003 | 47 | 21 |
| SERPING1 | ZNF350 | 0.32 | 39 | 10 | 16 | 5 | 79.6% | 76.2% | 0.0391 | 1.4E−06 | 49 | 21 |
| IL8 | NBEA | 0.32 | 41 | 8 | 16 | 5 | 83.7% | 76.2% | 0.0297 | 0.0001 | 49 | 21 |
| C1QB | MME | 0.32 | 39 | 8 | 16 | 5 | 83.0% | 76.2% | 2.7E−06 | 0.0232 | 47 | 21 |
| CCL5 | MYC | 0.32 | 36 | 11 | 16 | 5 | 76.6% | 76.2% | 8.6E−07 | 0.0004 | 47 | 21 |
| GSK3B | IRF1 | 0.32 | 36 | 11 | 16 | 5 | 76.6% | 76.2% | 3.3E−06 | 2.1E−05 | 47 | 21 |
| CNKSR2 | USP7 | 0.32 | 40 | 7 | 18 | 3 | 85.1% | 85.7% | 2.6E−07 | 0.0380 | 47 | 21 |
| EGR1 | GSK3B | 0.32 | 39 | 10 | 16 | 5 | 79.6% | 76.2% | 2.7E−05 | 0.0019 | 49 | 21 |
| IL8 | ZNF350 | 0.32 | 40 | 9 | 17 | 4 | 81.6% | 81.0% | 0.0444 | 0.0002 | 49 | 21 |
| BAX | ZNF350 | 0.32 | 38 | 11 | 16 | 5 | 77.6% | 76.2% | 0.0450 | 2.0E−07 | 49 | 21 |
| C1QB | XRCC1 | 0.32 | 39 | 10 | 16 | 5 | 79.6% | 76.2% | 8.5E−07 | 0.0308 | 49 | 21 |
| NBEA | SERPINE1 | 0.32 | 40 | 9 | 17 | 4 | 81.6% | 81.0% | 1.3E−06 | 0.0340 | 49 | 21 |
| RBM5 | TNF | 0.32 | 36 | 11 | 16 | 5 | 76.6% | 76.2% | 0.0006 | 9.1E−07 | 47 | 21 |
| C1QA | RBM5 | 0.32 | 36 | 10 | 16 | 5 | 78.3% | 76.2% | 8.9E−07 | 0.0119 | 46 | 21 |
| MSH2 | ZNF350 | 0.31 | 42 | 7 | 16 | 5 | 85.7% | 76.2% | 0.0485 | 0.0113 | 49 | 21 |
| TGFB1 | TNFSF5 | 0.31 | 38 | 9 | 17 | 4 | 80.9% | 81.0% | 0.0007 | 4.2E−06 | 47 | 21 |
| C1QA | SIAH2 | 0.31 | 36 | 10 | 16 | 5 | 78.3% | 76.2% | 0.0001 | 0.0133 | 46 | 21 |
| C1QB | IQGAP1 | 0.31 | 38 | 11 | 16 | 5 | 77.6% | 76.2% | 5.3E−07 | 0.0368 | 49 | 21 |
| CNKSR2 | SRF | 0.31 | 36 | 11 | 17 | 4 | 76.6% | 81.0% | 4.0E−07 | 0.0487 | 47 | 21 |
| HMOX1 | ING2 | 0.31 | 36 | 11 | 16 | 5 | 76.6% | 76.2% | 0.0001 | 0.0001004 | 47 | 21 |
| EGR1 | PTPRK | 0.31 | 40 | 10 | 19 | 4 | 80.0% | 82.6% | 7.3E−06 | 0.0106 | 50 | 23 |
| C1QA | MME | 0.31 | 38 | 9 | 17 | 4 | 80.9% | 81.0% | 3.7E−06 | 0.0170 | 47 | 21 |
| C1QA | ESR1 | 0.31 | 40 | 7 | 17 | 4 | 85.1% | 81.0% | 3.0E−06 | 0.0171 | 47 | 21 |
| C1QB | CCL5 | 0.31 | 38 | 9 | 17 | 4 | 80.9% | 81.0% | 0.0005 | 0.0257 | 47 | 21 |
| C1QB | TNF | 0.31 | 39 | 10 | 17 | 4 | 79.6% | 81.0% | 0.0011 | 0.0393 | 49 | 21 |
| HOXA10 | NBEA | 0.31 | 38 | 11 | 16 | 5 | 77.6% | 76.2% | 0.0429 | 7.0E−06 | 49 | 21 |
| C1QB | SPARC | 0.31 | 38 | 9 | 17 | 4 | 80.9% | 81.0% | 0.0011 | 0.0329 | 47 | 21 |
| ITGAL | TNFSF5 | 0.31 | 39 | 7 | 16 | 5 | 84.8% | 76.2% | 0.0009 | 5.2E−07 | 46 | 21 |
| NRAS | TNFSF5 | 0.31 | 39 | 8 | 17 | 4 | 83.0% | 81.0% | 0.0008 | 1.4E−06 | 47 | 21 |
| E2F1 | NBEA | 0.31 | 39 | 8 | 16 | 5 | 83.0% | 76.2% | 0.0365 | 0.0002 | 47 | 21 |
| ADAM17 | MTF1 | 0.31 | 37 | 10 | 17 | 4 | 78.7% | 81.0% | 8.5E−07 | 1.7E−05 | 47 | 21 |
| NBEA | TIMP1 | 0.31 | 37 | 12 | 16 | 5 | 75.5% | 76.2% | 4.9E−06 | 0.0467 | 49 | 21 |
| C1QA | CD97 | 0.31 | 38 | 8 | 17 | 4 | 82.6% | 81.0% | 3.9E−07 | 0.0161 | 46 | 21 |
| C1QB | SP1 | 0.31 | 37 | 10 | 17 | 4 | 78.7% | 81.0% | 3.9E−07 | 0.0364 | 47 | 21 |
| E2F1 | TNFSF5 | 0.31 | 36 | 11 | 17 | 4 | 76.6% | 81.0% | 0.0009 | 0.0002 | 47 | 21 |
| C1QA | SPARC | 0.31 | 39 | 8 | 17 | 4 | 83.0% | 81.0% | 0.0013 | 0.0194 | 47 | 21 |
| C1QB | RBM5 | 0.31 | 37 | 10 | 16 | 5 | 78.7% | 76.2% | 1.3E−06 | 0.0309 | 47 | 21 |
| CCL5 | MTA1 | 0.31 | 37 | 10 | 17 | 4 | 78.7% | 81.0% | 4.0E−07 | 0.0006 | 47 | 21 |
| TNFSF5 | USP7 | 0.31 | 37 | 10 | 16 | 5 | 78.7% | 76.2% | 4.2E−07 | 0.0010 | 47 | 21 |
| C1QA | IL8 | 0.31 | 40 | 7 | 17 | 4 | 85.1% | 81.0% | 0.0002 | 0.0222 | 47 | 21 |
| CCL5 | MSH2 | 0.30 | 38 | 9 | 17 | 4 | 80.9% | 81.0% | 0.0139 | 0.0007 | 47 | 21 |
| SPARC | TXNRD1 | 0.30 | 40 | 7 | 17 | 4 | 85.1% | 81.0% | 1.4E−05 | 0.0015 | 47 | 21 |
| CTSD | GSK3B | 0.30 | 38 | 11 | 16 | 5 | 77.6% | 76.2% | 4.8E−05 | 4.5E−07 | 49 | 21 |
| CA4 | MSH2 | 0.30 | 38 | 9 | 16 | 5 | 80.9% | 76.2% | 0.0157 | 6.5E−06 | 47 | 21 |
| C1QB | PTPRC | 0.30 | 39 | 8 | 16 | 5 | 83.0% | 76.2% | 6.2E−07 | 0.0369 | 47 | 21 |
| MSH2 | XK | 0.30 | 38 | 11 | 16 | 5 | 77.6% | 76.2% | 5.4E−07 | 0.0197 | 49 | 21 |
| APC | TEGT | 0.30 | 39 | 10 | 16 | 5 | 79.6% | 76.2% | 3.6E−07 | 0.0010 | 49 | 21 |
| IRF1 | TXNRD1 | 0.30 | 39 | 8 | 17 | 4 | 83.0% | 81.0% | 1.5E−05 | 6.1E−06 | 47 | 21 |
| EGR1 | TXNRD1 | 0.30 | 37 | 10 | 17 | 4 | 78.7% | 81.0% | 1.6E−05 | 0.0036 | 47 | 21 |
| APC | CTSD | 0.30 | 39 | 10 | 17 | 4 | 79.6% | 81.0% | 5.3E−07 | 0.0011 | 49 | 21 |
| IGF2BP2 | SIAH2 | 0.30 | 40 | 7 | 18 | 3 | 85.1% | 85.7% | 0.0002 | 9.7E−07 | 47 | 21 |
| C1QA | MYC | 0.30 | 38 | 9 | 17 | 4 | 80.9% | 81.0% | 1.8E−06 | 0.0289 | 47 | 21 |
| HMOX1 | LTA | 0.30 | 37 | 9 | 17 | 4 | 80.4% | 81.0% | 1.5E−05 | 0.0002 | 46 | 21 |
| C1QA | TNF | 0.30 | 36 | 11 | 16 | 5 | 76.6% | 76.2% | 0.0017 | 0.0322 | 47 | 21 |
| IFI16 | MSH2 | 0.30 | 36 | 11 | 17 | 4 | 76.6% | 81.0% | 0.0194 | 1.1E−05 | 47 | 21 |
| ING2 | SPARC | 0.29 | 38 | 9 | 16 | 5 | 80.9% | 76.2% | 0.0024 | 0.0003 | 47 | 21 |
| C1QA | PTPRK | 0.29 | 39 | 8 | 17 | 4 | 83.0% | 81.0% | 2.1E−05 | 0.0412 | 47 | 21 |
| APC | ETS2 | 0.29 | 37 | 12 | 16 | 5 | 75.5% | 76.2% | 7.4E−07 | 0.0016 | 49 | 21 |
| GSK3B | SERPINA1 | 0.29 | 37 | 10 | 17 | 4 | 78.7% | 81.0% | 7.5E−07 | 8.6E−05 | 47 | 21 |
| C1QA | CCL5 | 0.29 | 35 | 11 | 17 | 4 | 76.1% | 81.0% | 0.0010 | 0.0364 | 46 | 21 |
| C1QA | GNB1 | 0.29 | 40 | 7 | 16 | 5 | 85.1% | 76.2% | 8.1E−07 | 0.0440 | 47 | 21 |
| NCOA1 | TNF | 0.29 | 38 | 12 | 18 | 5 | 76.0% | 78.3% | 0.0104 | 2.9E−07 | 50 | 23 |
| IL8 | TNF | 0.29 | 39 | 11 | 18 | 5 | 78.0% | 78.3% | 0.0105 | 0.0004 | 50 | 23 |
| G6PD | TXNRD1 | 0.29 | 42 | 5 | 16 | 5 | 89.4% | 76.2% | 2.6E−05 | 3.2E−06 | 47 | 21 |
| C1QA | IQGAP1 | 0.29 | 37 | 10 | 16 | 5 | 78.7% | 76.2% | 1.5E−06 | 0.0459 | 47 | 21 |
| GNB1 | HMOX1 | 0.29 | 38 | 9 | 16 | 5 | 80.9% | 76.2% | 0.0003 | 8.8E−07 | 47 | 21 |
| MSH6 | | 0.29 | 37 | 10 | 17 | 4 | 78.7% | 81.0% | 8.1E−07 | | 47 | 21 |
| MTA1 | TNFSF5 | 0.29 | 36 | 10 | 17 | 4 | 78.3% | 81.0% | 0.0024 | 9.7E−07 | 46 | 21 |
| EGR1 | MYC | 0.29 | 38 | 12 | 18 | 5 | 76.0% | 78.3% | 7.6E−07 | 0.0363 | 50 | 23 |
| GSK3B | NRAS | 0.29 | 38 | 11 | 17 | 4 | 77.6% | 81.0% | 3.4E−06 | 0.0001 | 49 | 21 |
| TIMP1 | TNFSF5 | 0.29 | 42 | 5 | 16 | 5 | 89.4% | 76.2% | 0.0025 | 2.1E−05 | 47 | 21 |
| MSH2 | SPARC | 0.28 | 38 | 9 | 17 | 4 | 80.9% | 81.0% | 0.0041 | 0.0440 | 47 | 21 |
| MSH2 | | 0.28 | 41 | 9 | 19 | 4 | 82.0% | 82.6% | 4.4E−07 | | 50 | 23 |
| IQGAP1 | TIMP1 | 0.28 | 38 | 12 | 18 | 5 | 76.0% | 78.3% | 1.9E−05 | 1.3E−06 | 50 | 23 |
| APC | CTNNA1 | 0.28 | 37 | 12 | 16 | 5 | 75.5% | 76.2% | 1.3E−06 | 0.0029 | 49 | 21 |
| ADAM17 | S100A11 | 0.28 | 39 | 8 | 16 | 5 | 83.0% | 76.2% | 7.7E−06 | 6.6E−05 | 47 | 21 |
| HMOX1 | MYC | 0.28 | 38 | 9 | 18 | 3 | 80.9% | 85.7% | 5.3E−06 | 0.0005 | 47 | 21 |
| LTA | SPARC | 0.28 | 36 | 10 | 16 | 5 | 78.3% | 76.2% | 0.0047 | 4.5E−05 | 46 | 21 |
| CNKSR2 | | 0.27 | 39 | 10 | 17 | 4 | 79.6% | 81.0% | 1.3E−06 | | 49 | 21 |
| ADAM17 | IRF1 | 0.27 | 37 | 9 | 17 | 4 | 80.4% | 81.0% | 2.3E−05 | 7.7E−05 | 46 | 21 |
| LARGE | TNF | 0.27 | 39 | 10 | 16 | 5 | 79.6% | 76.2% | 0.0064 | 3.7E−06 | 49 | 21 |
| SIAH2 | TNF | 0.27 | 36 | 11 | 16 | 5 | 76.6% | 76.2% | 0.0044 | 0.0007 | 47 | 21 |
| CCL5 | ING2 | 0.27 | 37 | 10 | 16 | 5 | 78.7% | 76.2% | 0.0012 | 0.0031 | 47 | 21 |
| EGR1 | MLH1 | 0.27 | 37 | 10 | 16 | 5 | 78.7% | 76.2% | 0.0002 | 0.0133 | 47 | 21 |
| CCL5 | GNB1 | 0.27 | 36 | 11 | 16 | 5 | 76.6% | 76.2% | 2.2E−06 | 0.0034 | 47 | 21 |
| HMOX1 | SIAH2 | 0.27 | 36 | 10 | 16 | 5 | 78.3% | 76.2% | 0.0007 | 0.0006 | 46 | 21 |
| HMOX1 | LGALS8 | 0.27 | 38 | 8 | 16 | 5 | 82.6% | 76.2% | 2.6E−06 | 0.0006 | 46 | 21 |
| E2F1 | ING2 | 0.27 | 36 | 11 | 16 | 5 | 76.6% | 76.2% | 0.0010 | 0.0014 | 47 | 21 |
| SRF | TNFSF5 | 0.26 | 37 | 10 | 16 | 5 | 78.7% | 76.2% | 0.0066 | 3.1E−06 | 47 | 21 |
| EGR1 | SIAH2 | 0.26 | 37 | 10 | 16 | 5 | 78.7% | 76.2% | 0.0010 | 0.0184 | 47 | 21 |
| MLH1 | TGFB1 | 0.26 | 36 | 11 | 16 | 5 | 76.6% | 76.2% | 3.2E−05 | 0.0003 | 47 | 21 |
| DIABLO | TNFSF5 | 0.26 | 36 | 11 | 16 | 5 | 76.6% | 76.2% | 0.0078 | 3.0E−06 | 47 | 21 |
| HMOX1 | MME | 0.26 | 38 | 9 | 17 | 4 | 80.9% | 81.0% | 3.3E−05 | 0.0009 | 47 | 21 |
| ING2 | NRAS | 0.26 | 40 | 9 | 16 | 5 | 81.6% | 76.2% | 1.1E−05 | 0.0015 | 49 | 21 |
| C1QB | | 0.26 | 39 | 10 | 17 | 4 | 79.6% | 81.0% | 2.3E−06 | | 49 | 21 |
| CCL5 | SIAH2 | 0.26 | 36 | 11 | 16 | 5 | 76.6% | 76.2% | 0.0012 | 0.0051 | 47 | 21 |
| ING2 | S100A11 | 0.26 | 36 | 11 | 16 | 5 | 76.6% | 76.2% | 1.8E−05 | 0.0019 | 47 | 21 |
| CCL5 | LARGE | 0.26 | 37 | 10 | 16 | 5 | 78.7% | 76.2% | 9.8E−06 | 0.0060 | 47 | 21 |
| APC | MNDA | 0.26 | 36 | 11 | 16 | 5 | 76.6% | 76.2% | 3.8E−06 | 0.0070 | 47 | 21 |
| GSK3B | TLR2 | 0.26 | 37 | 10 | 17 | 4 | 78.7% | 81.0% | 4.7E−06 | 0.0003 | 47 | 21 |
| IL8 | ING2 | 0.26 | 37 | 12 | 16 | 5 | 75.5% | 76.2% | 0.0019 | 0.0024 | 49 | 21 |
| SPARC | XRCC1 | 0.26 | 37 | 10 | 16 | 5 | 78.7% | 76.2% | 1.3E−05 | 0.0140 | 47 | 21 |
| DIABLO | HMOX1 | 0.26 | 38 | 9 | 17 | 4 | 80.9% | 81.0% | 0.0012 | 3.7E−06 | 47 | 21 |
| CCL5 | DIABLO | 0.26 | 37 | 10 | 16 | 5 | 78.7% | 76.2% | 3.8E−06 | 0.0062 | 47 | 21 |
| MLH1 | SPARC | 0.26 | 36 | 10 | 16 | 5 | 78.3% | 76.2% | 0.0115 | 0.0003 | 46 | 21 |
| ADAM17 | MAPK14 | 0.26 | 36 | 11 | 16 | 5 | 76.6% | 76.2% | 4.3E−06 | 0.0002 | 47 | 21 |
| APC | HSPA1A | 0.25 | 37 | 12 | 16 | 5 | 75.5% | 76.2% | 3.3E−06 | 0.0101 | 49 | 21 |
| PTPRK | SPARC | 0.25 | 37 | 10 | 17 | 4 | 78.7% | 81.0% | 0.0163 | 0.0001 | 47 | 21 |
| EGR1 | GNB1 | 0.25 | 38 | 11 | 16 | 5 | 77.6% | 76.2% | 3.7E−06 | 0.0398 | 49 | 21 |
| IQGAP1 | MYD88 | 0.25 | 39 | 11 | 18 | 5 | 78.0% | 78.3% | 5.5E−06 | 4.9E−06 | 50 | 23 |
| TNF | USP7 | 0.25 | 37 | 10 | 17 | 4 | 78.7% | 81.0% | 4.6E−06 | 0.0155 | 47 | 21 |
| G6PD | TNFSF5 | 0.25 | 40 | 7 | 16 | 5 | 85.1% | 76.2% | 0.0133 | 1.9E−05 | 47 | 21 |
| CCL5 | EGR1 | 0.25 | 38 | 9 | 16 | 5 | 80.9% | 76.2% | 0.0362 | 0.0083 | 47 | 21 |
| PLEK2 | SIAH2 | 0.25 | 37 | 10 | 17 | 4 | 78.7% | 81.0% | 0.0020 | 7.0E−06 | 47 | 21 |
| SPARC | TNF | 0.25 | 38 | 9 | 16 | 5 | 80.9% | 76.2% | 0.0167 | 0.0196 | 47 | 21 |
| ADAM17 | TLR2 | 0.25 | 35 | 11 | 16 | 5 | 76.1% | 76.2% | 7.3E−06 | 0.0002 | 46 | 21 |
| DAD1 | TNF | 0.25 | 37 | 12 | 16 | 5 | 75.5% | 76.2% | 0.0211 | 4.3E−06 | 49 | 21 |
| EGR1 | SPARC | 0.25 | 39 | 8 | 16 | 5 | 83.0% | 76.2% | 0.0211 | 0.0462 | 47 | 21 |
| APC | BAX | 0.25 | 37 | 12 | 16 | 5 | 75.5% | 76.2% | 4.4E−06 | 0.0138 | 49 | 21 |
| EGR1 | HMOX1 | 0.25 | 36 | 11 | 16 | 5 | 76.6% | 76.2% | 0.0018 | 0.0490 | 47 | 21 |
| APC | NCOA1 | 0.25 | 37 | 12 | 16 | 5 | 75.5% | 76.2% | 5.3E−06 | 0.0142 | 49 | 21 |
| ADAM17 | TIMP1 | 0.25 | 36 | 11 | 16 | 5 | 76.6% | 76.2% | 8.6E−05 | 0.0003 | 47 | 21 |
| HMOX1 | SPARC | 0.24 | 40 | 7 | 17 | 4 | 85.1% | 81.0% | 0.0246 | 0.0020 | 47 | 21 |
| CAV1 | TNF | 0.24 | 39 | 10 | 16 | 5 | 79.6% | 76.2% | 0.0251 | 0.0002 | 49 | 21 |
| E2F1 | TNF | 0.24 | 38 | 9 | 16 | 5 | 80.9% | 76.2% | 0.0218 | 0.0043 | 47 | 21 |
| ING2 | TNFRSF1A | 0.24 | 39 | 10 | 16 | 5 | 79.6% | 76.2% | 1.1E−05 | 0.0034 | 49 | 21 |
| APC | SERPINE1 | 0.24 | 38 | 11 | 16 | 5 | 77.6% | 76.2% | 3.4E−05 | 0.0163 | 49 | 21 |
| C1QA | | 0.24 | 37 | 10 | 16 | 5 | 78.7% | 76.2% | 6.1E−06 | | 47 | 21 |
| FOS | PTEN | 0.24 | 38 | 11 | 18 | 5 | 77.6% | 78.3% | 8.0E−05 | 0.0001 | 49 | 23 |
| SPARC | ZNF185 | 0.24 | 38 | 9 | 17 | 4 | 80.9% | 81.0% | 9.1E−06 | 0.0280 | 47 | 21 |
| HMOX1 | PTPRK | 0.24 | 38 | 9 | 16 | 5 | 80.9% | 76.2% | 0.0002 | 0.0023 | 47 | 21 |
| CCL5 | ITGAL | 0.24 | 36 | 11 | 16 | 5 | 76.6% | 76.2% | 9.3E−06 | 0.0124 | 47 | 21 |
| APC | CAV1 | 0.24 | 38 | 11 | 16 | 5 | 77.6% | 76.2% | 0.0002 | 0.0181 | 49 | 21 |
| SIAH2 | TNFSF5 | 0.24 | 36 | 10 | 16 | 5 | 78.3% | 76.2% | 0.0219 | 0.0027 | 46 | 21 |
| MLH1 | MTF1 | 0.24 | 37 | 10 | 16 | 5 | 78.7% | 76.2% | 1.8E−05 | 0.0007 | 47 | 21 |
| EGR1 | | 0.24 | 39 | 11 | 18 | 5 | 78.0% | 78.3% | 3.0E−06 | | 50 | 23 |
| FOS | IL8 | 0.24 | 38 | 11 | 18 | 5 | 77.6% | 78.3% | 0.0071 | 0.0001 | 49 | 23 |
| CD59 | ING2 | 0.24 | 37 | 12 | 16 | 5 | 75.5% | 76.2% | 0.0045 | 2.4E−05 | 49 | 21 |
| ADAM17 | G6PD | 0.24 | 37 | 10 | 16 | 5 | 78.7% | 76.2% | 2.7E−05 | 0.0004 | 47 | 21 |
| GSK3B | IL8 | 0.24 | 37 | 12 | 16 | 5 | 75.5% | 76.2% | 0.0058 | 0.0010 | 49 | 21 |
| CD97 | HMOX1 | 0.24 | 35 | 11 | 16 | 5 | 76.1% | 76.2% | 0.0026 | 8.9E−06 | 46 | 21 |
| HMOX1 | VIM | 0.23 | 38 | 9 | 17 | 4 | 80.9% | 81.0% | 9.3E−06 | 0.0033 | 47 | 21 |
| ESR1 | HMOX1 | 0.23 | 38 | 9 | 16 | 5 | 80.9% | 76.2% | 0.0035 | 9.5E−05 | 47 | 21 |
| MYD88 | TNFSF5 | 0.23 | 37 | 10 | 16 | 5 | 78.7% | 76.2% | 0.0305 | 2.4E−05 | 47 | 21 |
| TLR2 | TXNRD1 | 0.23 | 36 | 11 | 16 | 5 | 76.6% | 76.2% | 0.0003 | 1.4E−05 | 47 | 21 |
| HOXA10 | LTA | 0.23 | 41 | 6 | 17 | 4 | 87.2% | 81.0% | 0.0004 | 0.0002 | 47 | 21 |
| IL8 | SPARC | 0.23 | 37 | 10 | 16 | 5 | 78.7% | 76.2% | 0.0487 | 0.0055 | 47 | 21 |
| SERPINE1 | TNFSF5 | 0.23 | 37 | 10 | 16 | 5 | 78.7% | 76.2% | 0.0338 | 7.8E−05 | 47 | 21 |
| MME | SPARC | 0.23 | 39 | 8 | 16 | 5 | 83.0% | 76.2% | 0.0494 | 0.0001 | 47 | 21 |
| HMOX1 | LARGE | 0.23 | 37 | 10 | 16 | 5 | 78.7% | 76.2% | 3.1E−05 | 0.0039 | 47 | 21 |
| CCL5 | IL8 | 0.23 | 37 | 10 | 17 | 4 | 78.7% | 81.0% | 0.0066 | 0.0227 | 47 | 21 |
| APC | ITGAL | 0.23 | 36 | 11 | 16 | 5 | 76.6% | 76.2% | 1.6E−05 | 0.0273 | 47 | 21 |
| IKBKE | TGFB1 | 0.23 | 37 | 10 | 16 | 5 | 78.7% | 76.2% | 0.0002 | 0.0002 | 47 | 21 |
| HOXA10 | SIAH2 | 0.23 | 36 | 11 | 17 | 4 | 76.6% | 81.0% | 0.0055 | 0.0003 | 47 | 21 |
| CAV1 | ING2 | 0.23 | 38 | 11 | 16 | 5 | 77.6% | 76.2% | 0.0077 | 0.0005 | 49 | 21 |
| IRF1 | MME | 0.23 | 39 | 8 | 16 | 5 | 83.0% | 76.2% | 0.0002 | 0.0002 | 47 | 21 |
| MLH1 | PLXDC2 | 0.23 | 37 | 10 | 16 | 5 | 78.7% | 76.2% | 3.1E−05 | 0.0014 | 47 | 21 |
| HMOX1 | NCOA1 | 0.23 | 36 | 11 | 16 | 5 | 76.6% | 76.2% | 1.5E−05 | 0.0049 | 47 | 21 |
| CTSD | TNFSF5 | 0.22 | 38 | 9 | 16 | 5 | 80.9% | 76.2% | 0.0467 | 2.0E−05 | 47 | 21 |
| ING2 | MAPK14 | 0.22 | 36 | 11 | 17 | 4 | 76.6% | 81.0% | 1.8E−05 | 0.0107 | 47 | 21 |
| APC | PTGS2 | 0.22 | 39 | 10 | 16 | 5 | 79.6% | 76.2% | 1.3E−05 | 0.0468 | 49 | 21 |
| LTA | TGFB1 | 0.22 | 36 | 11 | 16 | 5 | 76.6% | 76.2% | 0.0002 | 0.0006 | 47 | 21 |
| CCL5 | ESR1 | 0.22 | 36 | 11 | 16 | 5 | 76.6% | 76.2% | 0.0003 | 0.0364 | 47 | 21 |
| ADAM17 | RP51077B9.4 | 0.21 | 36 | 11 | 16 | 5 | 76.6% | 76.2% | 0.0006 | 0.0013 | 47 | 21 |
| CCL5 | HMOX1 | 0.21 | 37 | 9 | 16 | 5 | 80.4% | 76.2% | 0.0092 | 0.0484 | 46 | 21 |
| CA4 | PTEN | 0.21 | 37 | 10 | 16 | 5 | 78.7% | 76.2% | 0.0001 | 0.0005 | 47 | 21 |
| HOXA10 | IKBKE | 0.20 | 36 | 11 | 17 | 4 | 76.6% | 81.0% | 0.0004 | 0.0008 | 47 | 21 |
| G6PD | ING2 | 0.20 | 39 | 10 | 16 | 5 | 79.6% | 76.2% | 0.0251 | 0.0001 | 49 | 21 |
| ADAM17 | UBE2C | 0.20 | 36 | 10 | 17 | 4 | 78.3% | 81.0% | 0.0010 | 0.0019 | 46 | 21 |
| ING2 | SERPINE1 | 0.20 | 40 | 9 | 16 | 5 | 81.6% | 76.2% | 0.0002 | 0.0277 | 49 | 21 |
| BCAM | SIAH2 | 0.20 | 35 | 11 | 16 | 5 | 76.1% | 76.2% | 0.0175 | 6.2E−05 | 46 | 21 |
| IFI16 | XRCC1 | 0.20 | 37 | 10 | 16 | 5 | 78.7% | 76.2% | 0.0002 | 0.0008 | 47 | 21 |
| HMOX1 | PTPRC | 0.20 | 38 | 8 | 16 | 5 | 82.6% | 76.2% | 6.4E−05 | 0.0163 | 46 | 21 |
| S100A4 | SIAH2 | 0.20 | 36 | 11 | 16 | 5 | 76.6% | 76.2% | 0.0238 | 5.0E−05 | 47 | 21 |
| CTNNA1 | ING2 | 0.19 | 38 | 11 | 16 | 5 | 77.6% | 76.2% | 0.0365 | 6.0E−05 | 49 | 21 |
| GSK3B | HSPA1A | 0.19 | 37 | 12 | 16 | 5 | 75.5% | 76.2% | 4.7E−05 | 0.0078 | 49 | 21 |
| PTEN | S100A11 | 0.19 | 39 | 8 | 17 | 4 | 83.0% | 81.0% | 0.0004 | 0.0003 | 47 | 21 |
| IRF1 | SP1 | 0.19 | 40 | 7 | 17 | 4 | 85.1% | 81.0% | 8.7E−05 | 0.0011 | 47 | 21 |
| HMOX1 | S100A4 | 0.19 | 38 | 9 | 17 | 4 | 80.9% | 81.0% | 8.3E−05 | 0.0327 | 47 | 21 |
| HMOX1 | PTEN | 0.19 | 37 | 10 | 17 | 4 | 78.7% | 81.0% | 0.0004 | 0.0333 | 47 | 21 |
| GSK3B | ST14 | 0.18 | 39 | 10 | 17 | 4 | 79.6% | 81.0% | 0.0001 | 0.0123 | 49 | 21 |
| HMOX1 | USP7 | 0.18 | 36 | 11 | 16 | 5 | 76.6% | 76.2% | 0.0001 | 0.0451 | 47 | 21 |
| CD97 | IRF1 | 0.16 | 36 | 10 | 16 | 5 | 78.3% | 76.2% | 0.0032 | 0.0002 | 46 | 21 |
| CASP9 | MLH1 | 0.16 | 36 | 11 | 16 | 5 | 76.6% | 76.2% | 0.0294 | 0.0002 | 47 | 21 |
| CCL3 | MLH1 | 0.15 | 35 | 11 | 16 | 5 | 76.1% | 76.2% | 0.0344 | 0.0007 | 46 | 21 |
| IQGAP1 | IRF1 | 0.15 | 37 | 10 | 16 | 5 | 78.7% | 76.2% | 0.0067 | 0.0008 | 47 | 21 |
| IRF1 | LGALS8 | 0.14 | 35 | 11 | 16 | 5 | 76.1% | 76.2% | 0.0006 | 0.0077 | 46 | 21 |
| GNB1 | IFI16 | 0.14 | 36 | 11 | 16 | 5 | 76.6% | 76.2% | 0.0126 | 0.0007 | 47 | 21 |
| LGALS8 | TGFB1 | 0.13 | 36 | 11 | 16 | 5 | 76.6% | 76.2% | 0.0138 | 0.0012 | 47 | 21 |
| ESR1 | HOXA10 | 0.13 | 38 | 11 | 16 | 5 | 77.6% | 76.2% | 0.0324 | 0.0098 | 49 | 21 |
| HOXA10 | NUDT4 | 0.12 | 40 | 7 | 16 | 5 | 85.1% | 76.2% | 0.0071 | 0.0345 | 47 | 21 |

TABLE 5B

| | Colon | Normals | Sum |
|---|---|---|---|
| Group Size | 31.5% | 68.5% | 100% |
| N = | 23 | 50 | 73 |

| Gene | Mean | Mean | p-val |
|---|---|---|---|
| AXIN2 | 20.3 | 19.2 | 2.4E−09 |
| CCR7 | 15.8 | 14.8 | 5.9E−09 |
| MSH2 | 18.7 | 17.9 | 4.4E−07 |
| MSH6 | 20.0 | 19.3 | 8.1E−07 |
| CNKSR2 | 22.1 | 21.2 | 1.3E−06 |
| ZNF350 | 19.9 | 19.3 | 1.6E−06 |
| NBEA | 22.7 | 21.6 | 2.1E−06 |
| C1QB | 19.7 | 21.2 | 2.3E−06 |
| EGR1 | 18.9 | 19.8 | 3.0E−06 |
| C1QA | 19.3 | 20.7 | 6.1E−06 |
| TNF | 18.1 | 18.7 | 8.0E−06 |
| SPARC | 14.0 | 14.8 | 8.2E−05 |
| APC | 18.4 | 17.8 | 0.0001 |
| TNFSF5 | 18.3 | 17.7 | 0.0001 |
| CCL5 | 11.7 | 12.3 | 0.0002 |
| IL8 | 22.3 | 21.4 | 0.0002 |
| E2F1 | 19.5 | 20.2 | 0.0004 |
| ING2 | 19.9 | 19.6 | 0.0005 |
| SIAH2 | 13.1 | 14.0 | 0.0007 |
| HMOX1 | 15.7 | 16.3 | 0.0009 |
| GSK3B | 16.2 | 15.8 | 0.0021 |
| MLH1 | 18.1 | 17.8 | 0.0030 |
| PTPRK | 22.4 | 21.7 | 0.0042 |
| TGFB1 | 12.4 | 12.7 | 0.0050 |
| ADAM17 | 18.6 | 18.2 | 0.0060 |
| CAV1 | 22.9 | 23.7 | 0.0072 |
| TIMP1 | 14.4 | 14.7 | 0.0074 |
| PTEN | 14.2 | 13.8 | 0.0088 |
| FOS | 15.1 | 15.6 | 0.0091 |
| TXNRD1 | 17.2 | 16.9 | 0.0093 |
| LTA | 19.6 | 19.3 | 0.0095 |
| HOXA10 | 22.4 | 23.1 | 0.0115 |
| UBE2C | 20.4 | 20.8 | 0.0118 |
| RP51077B9.4 | 16.3 | 16.6 | 0.0130 |
| SERPING1 | 17.5 | 18.3 | 0.0144 |
| IFI16 | 14.3 | 14.6 | 0.0178 |
| CA4 | 18.5 | 19.1 | 0.0225 |
| IRF1 | 12.5 | 12.8 | 0.0252 |
| IKBKE | 17.0 | 16.7 | 0.0280 |
| MME | 15.5 | 15.1 | 0.0295 |
| NRAS | 16.8 | 17.0 | 0.0309 |
| SERPINE1 | 20.5 | 20.9 | 0.0339 |
| GADD45A | 19.0 | 19.3 | 0.0353 |
| ESR1 | 22.3 | 21.9 | 0.0383 |
| ESR2 | 24.5 | 23.9 | 0.0417 |
| G6PD | 15.4 | 15.7 | 0.0437 |
| S100A11 | 11.0 | 11.3 | 0.0628 |
| CDH1 | 20.1 | 20.4 | 0.0691 |
| NUDT4 | 15.7 | 16.1 | 0.0732 |
| TNFRSF1A | 15.1 | 15.4 | 0.0809 |
| ST14 | 17.6 | 17.9 | 0.0857 |
| MMP9 | 14.1 | 14.6 | 0.0877 |
| XRCC1 | 18.6 | 18.4 | 0.0960 |
| HMGA1 | 15.6 | 15.8 | 0.1154 |
| NEDD4L | 18.3 | 18.5 | 0.1201 |
| CD59 | 17.5 | 17.7 | 0.1205 |
| RBM5 | 16.1 | 15.9 | 0.1214 |
| MYD88 | 14.3 | 14.5 | 0.1359 |
| IQGAP1 | 14.0 | 13.8 | 0.1550 |
| LARGE | 22.3 | 22.0 | 0.1674 |
| MTF1 | 17.6 | 17.9 | 0.1794 |
| MYC | 18.3 | 18.1 | 0.1898 |
| PLXDC2 | 16.6 | 16.7 | 0.1958 |
| CCL3 | 20.0 | 20.2 | 0.2456 |
| CEACAM1 | 18.3 | 18.5 | 0.2484 |
| IGF2BP2 | 15.7 | 15.9 | 0.2504 |
| IGFBP3 | 22.1 | 22.4 | 0.3151 |
| DLC1 | 23.3 | 23.5 | 0.3424 |
| XK | 17.6 | 17.9 | 0.3635 |
| PLEK2 | 18.2 | 18.5 | 0.3701 |
| ANLN | 22.2 | 22.4 | 0.3744 |
| PTPRC | 12.4 | 12.3 | 0.4140 |
| ZNF185 | 16.9 | 17.0 | 0.4201 |
| ITGAL | 14.6 | 14.7 | 0.4241 |
| TLR2 | 16.0 | 16.1 | 0.4248 |
| BCAM | 20.4 | 20.7 | 0.4396 |
| CTSD | 13.0 | 13.2 | 0.4600 |
| S100A4 | 13.0 | 13.2 | 0.4606 |
| CASP3 | 20.5 | 20.3 | 0.4626 |
| SRF | 16.3 | 16.4 | 0.4695 |
| BAX | 15.6 | 15.7 | 0.4717 |
| ETS2 | 17.3 | 17.4 | 0.4889 |
| CXCL1 | 19.8 | 19.7 | 0.5361 |
| ACPP | 18.0 | 17.9 | 0.5367 |
| MAPK14 | 15.2 | 15.3 | 0.5479 |
| LGALS8 | 17.5 | 17.4 | 0.5731 |
| MEIS1 | 21.7 | 21.8 | 0.5828 |
| MNDA | 12.7 | 12.8 | 0.6082 |
| PLAU | 23.9 | 24.0 | 0.6255 |
| SP1 | 15.8 | 15.7 | 0.6356 |
| GNB1 | 13.5 | 13.4 | 0.6407 |
| NCOA1 | 16.2 | 16.2 | 0.6518 |
| CTNNA1 | 16.9 | 17.0 | 0.6903 |
| DIABLO | 18.5 | 18.5 | 0.6940 |
| HSPA1A | 14.5 | 14.5 | 0.7229 |
| USP7 | 15.2 | 15.2 | 0.7383 |
| DAD1 | 15.3 | 15.3 | 0.7470 |
| POV1 | 18.2 | 18.2 | 0.7579 |
| PTGS2 | 17.2 | 17.2 | 0.7953 |
| CASP9 | 18.1 | 18.0 | 0.8087 |
| SERPINA1 | 12.7 | 12.7 | 0.8238 |
| TEGT | 12.4 | 12.4 | 0.8779 |
| VEGF | 22.7 | 22.8 | 0.9203 |
| MTA1 | 19.4 | 19.5 | 0.9261 |
| ELA2 | 20.9 | 20.8 | 0.9542 |
| VIM | 11.4 | 11.4 | 0.9681 |
| CD97 | 12.9 | 12.9 | 0.9862 |

TABLE 5C

| | | | | | | Predicted |
|---|---|---|---|---|---|---|
| | | | | | | probability |
| Patient ID | Group | AXIN2 | TNF | logit | odds | of colon cancer |
| CC-010:XS:200072430 | Colon Cancer | 22.23 | 18.09 | 12.34 | 2.3E+05 | 1.0000 |
| CC-007:XS:200072427 | Colon Cancer | 21.66 | 18.20 | 9.29 | 10865.66 | 0.9999 |
| CC-004:XS:200072424 | Colon Cancer | 21.76 | 18.57 | 8.42 | 4538.86 | 0.9998 |
| CC-008:XS:200072428 | Colon Cancer | 20.98 | 17.94 | 7.18 | 1307.55 | 0.9992 |
| CC-002:XS:200072422 | Colon Cancer | 21.33 | 18.56 | 6.49 | 660.48 | 0.9985 |
| CC-011:XS:200072431 | Colon Cancer | 20.36 | 17.45 | 6.11 | 449.07 | 0.9978 |
| CC-003:XS:200072423 | Colon Cancer | 20.31 | 17.65 | 5.14 | 170.20 | 0.9942 |
| CC-034:XS:200072442 | Colon Cancer | 20.18 | 17.64 | 4.59 | 98.65 | 0.9900 |
| CC-031:XS:200072439 | Colon Cancer | 19.70 | 17.08 | 4.42 | 83.04 | 0.9881 |
| CC-014:XS:200072434 | Colon Cancer | 20.46 | 18.41 | 3.00 | 20.17 | 0.9528 |
| CC-006:XS:200072426 | Colon Cancer | 20.09 | 18.13 | 2.38 | 10.83 | 0.9155 |
| HN-041-XS:200073106 | Normal | 19.78 | 17.89 | 1.85 | 6.35 | 0.8639 |
| CC-018:XS:200072436 | Colon Cancer | 19.84 | 18.03 | 1.62 | 5.04 | 0.8344 |
| CC-019:XS:200072437 | Colon Cancer | 20.02 | 18.26 | 1.56 | 4.77 | 0.8268 |
| CC-013:XS:200072433 | Colon Cancer | 20.68 | 19.18 | 1.23 | 3.43 | 0.7742 |
| HN-001-XS:200072922 | Normal | 19.95 | 18.32 | 1.04 | 2.83 | 0.7388 |
| CC-032:XS:200072440 | Colon Cancer | 19.61 | 18.03 | 0.52 | 1.68 | 0.6264 |
| CC-005:XS:200072425 | Colon Cancer | 20.11 | 18.67 | 0.50 | 1.65 | 0.6231 |
| CC-033:XS:200072441 | Colon Cancer | 19.28 | 17.69 | 0.28 | 1.32 | 0.5686 |
| CC-009:XS:200072429 | Colon Cancer | 19.20 | 17.62 | 0.15 | 1.16 | 0.5370 |
| HN-050-XS:200073113 | Normal | 19.36 | 17.87 | 0.00 | 1.00 | 0.5010 |
| CC-012:XS:200072432 | Colon Cancer | 20.04 | 18.81 | −0.32 | 0.72 | 0.4197 |
| HN-004-XS:200072925 | Normal | 19.54 | 18.23 | −0.52 | 0.60 | 0.3738 |
| HN-029-XS:200073095 | Normal | 20.31 | 19.33 | −1.02 | 0.36 | 0.2647 |
| HN-026-XS:200073092 | Normal | 20.17 | 19.24 | −1.35 | 0.26 | 0.2063 |
| HN-012-XS:200072931 | Normal | 19.57 | 18.52 | −1.48 | 0.23 | 0.1855 |
| HN-010-XS:200072930 | Normal | 19.13 | 18.06 | −1.78 | 0.17 | 0.1446 |
| HN-015-XS:200072934 | Normal | 19.34 | 18.39 | −2.04 | 0.13 | 0.1153 |
| HN-007-XS:200072927 | Normal | 19.50 | 18.60 | −2.04 | 0.13 | 0.1149 |
| HN-049-XS:200073112 | Normal | 19.67 | 18.82 | −2.08 | 0.12 | 0.1111 |
| HN-035-XS:200073100 | Normal | 19.41 | 18.52 | −2.15 | 0.12 | 0.1046 |
| HN-040-XS:200073105 | Normal | 19.04 | 18.06 | −2.18 | 0.11 | 0.1014 |
| CC-015:XS:200072435 | Colon Cancer | 19.55 | 18.71 | −2.23 | 0.11 | 0.0968 |
| HN-106-XS:200073119 | Normal | 19.12 | 18.20 | −2.35 | 0.10 | 0.0873 |
| HN-034-XS:200073099 | Normal | 19.26 | 18.40 | −2.44 | 0.09 | 0.0801 |
| HN-008-XS:200072928 | Normal | 19.26 | 18.42 | −2.49 | 0.08 | 0.0766 |
| HN-002-XS:200072923 | Normal | 19.52 | 18.76 | −2.52 | 0.08 | 0.0746 |
| HN-038-XS:200073103 | Normal | 19.23 | 18.40 | −2.57 | 0.08 | 0.0708 |
| HN-025-XS:200073091 | Normal | 19.40 | 18.67 | −2.79 | 0.06 | 0.0578 |
| HN-102-XS:200073115 | Normal | 18.93 | 18.10 | −2.84 | 0.06 | 0.0554 |
| CC-001:XS:200072421 | Colon Cancer | 19.05 | 18.26 | −2.87 | 0.06 | 0.0536 |
| HN-044-XS:200073109 | Normal | 19.16 | 18.41 | −2.93 | 0.05 | 0.0507 |
| HN-042-XS:200073107 | Normal | 19.06 | 18.29 | −2.93 | 0.05 | 0.0506 |
| HN-039-XS:200073104 | Normal | 18.66 | 17.81 | −3.02 | 0.05 | 0.0466 |
| HN-022-XS:200072948 | Normal | 19.95 | 19.45 | −3.09 | 0.05 | 0.0434 |
| HN-020-XS:200072946 | Normal | 19.24 | 18.57 | −3.15 | 0.04 | 0.0410 |
| HN-104-XS:200073117 | Normal | 19.29 | 18.73 | −3.48 | 0.03 | 0.0300 |
| HN-019-XS:200072945 | Normal | 19.05 | 18.45 | −3.57 | 0.03 | 0.0274 |
| HN-027-XS:200073093 | Normal | 19.19 | 18.65 | −3.67 | 0.03 | 0.0249 |
| HN-045-XS:200073110 | Normal | 19.18 | 18.67 | −3.76 | 0.02 | 0.0227 |
| HN-014-XS:200072933 | Normal | 18.90 | 18.32 | −3.77 | 0.02 | 0.0224 |
| HN-016-XS:200072935 | Normal | 18.98 | 18.42 | −3.80 | 0.02 | 0.0219 |
| HN-030-XS:200073096 | Normal | 19.67 | 19.32 | −3.92 | 0.02 | 0.0194 |
| HN-017-XS:200072936 | Normal | 19.11 | 18.68 | −4.15 | 0.02 | 0.0156 |
| HN-032-XS:200073097 | Normal | 19.30 | 18.99 | −4.41 | 0.01 | 0.0120 |
| HN-105-XS:200073118 | Normal | 19.23 | 18.95 | −4.59 | 0.01 | 0.0101 |
| HN-047-XS:200073111 | Normal | 18.79 | 18.44 | −4.73 | 0.01 | 0.0087 |
| HN-033-XS:200073098 | Normal | 19.77 | 19.74 | −5.01 | 0.01 | 0.0066 |
| HN-036-XS:200073101 | Normal | 18.95 | 18.76 | −5.19 | 0.01 | 0.0055 |
| HN-018-XS:200072944 | Normal | 18.94 | 18.78 | −5.29 | 0.01 | 0.0050 |
| HN-005-XS:200072926 | Normal | 18.83 | 18.80 | −5.87 | 0.00 | 0.0028 |
| HN-037-XS:200073102 | Normal | 18.62 | 18.56 | −5.94 | 0.00 | 0.0026 |
| HN-101-XS:200073114 | Normal | 18.74 | 18.75 | −6.07 | 0.00 | 0.0023 |
| HN-009-XS:200072929 | Normal | 19.09 | 19.30 | −6.50 | 0.00 | 0.0015 |
| HN-003-XS:200072924 | Normal | 18.25 | 18.27 | −6.57 | 0.00 | 0.0014 |
| HN-103-XS:200073116 | Normal | 18.53 | 18.71 | −6.90 | 0.00 | 0.0010 |
| HN-024-XS:200073090 | Normal | 19.26 | 19.73 | −7.33 | 0.00 | 0.0007 |
| HN-028-XS:200073094 | Normal | 19.47 | 20.03 | −7.43 | 0.00 | 0.0006 |
| HN-107-XS:200073120 | Normal | 18.44 | 18.95 | −8.18 | 0.00 | 0.0003 |
| HN-021-XS:200072947 | Normal | 18.26 | 19.27 | −10.20 | 0.00 | 0.0000 |

The application's sequence listing, which the Patent Office published only in electronic form, follows.

SEQUENCE LISTING (285 sequences)

SEQ ID NO: 1 - DNA, 3372 bp, Homo sapiens
  gene (1)..(3372): Accession No. NM_016234
taaaaccaggaagtgaagtccccgagcacgttagaaagcctgacatggcctgactcgggacagctcagagcagggcagaactggggacactctgggccggccttctgcctgcatggacgctctgaagccaccctgtctctggaggaaccacgagcgagggaagaaggacagggactcgtgtggcaggaagaactcagagccgggaagcccccattcactagaagcactgagagatgcggccccctcgcagggtctgaatttcctgctgctgttcacaaagatgctttttatctttaactttttgttttccccacttccgaccccggcgttgatctgcatcctgacatttggagctgccatcttcttgtggctgatcaccagacctcaacccgtcttacctcttcttgacctgaacaatcagtctgtgggaattgagggaggagcacggaagggggtttcccagaagaacaatgacctaacaagttgctgcttctcagatgccaagactatgtatgaggttttccaaagaggactcgctgtgtctgacaatgggccctgcttgggatatagaaaaccaaaccagccctacagatggctatcttacaaacaggtgtctgatagagcagagtacctgggttcctgtctcttgcataaaggttataaatcatcaccagaccagtttgtcggcatctttgctcagaataggccagagtggatcatctccgaattggcttgttacacgtactctatggtagctgtacctctgtatgacaccttgggaccagaagccatcgtacatattgtcaacaaggctgatatcgccatggtgatctgtgacacaccccaaaaggcattggtgctgatagggaatgtagagaaaggcttcaccccgagcctgaaggtgatcatccttatggacccctttgatgatgacctgaagcaaagaggggagaagagtggaattgagatcttatccctatatgatgctgagaacctaggcaaagagcacttcagaaaacctgtgcctcctagcccagaagacctgagcgtcatctgcttcaccagtgggaccacaggtgaccccaaaggagccatgataacccatcaaaatattgtttcaaatgctgctgcctttctcaaatgtgtggagcatgcttatgagcccactcctgatgatgtggccatatcctacctccctctggctcatatgtttgagaggattgtacaggctgttgtgtacagctgtggagccagagttggattcttccaaggggatattcggttgctggctgacgacatgaagactttgaagcccacattgtttcccgcggtgcctcgactccttaacaggatctacgataaggtacaaaatgaggccaagacacccttgaagaagttcttgttgaagctggctgtttccagtaaattcaaagagcttcaaaagggtatcatcaggcatgatagtttctgggacaagctcatctttgcaaagatccaggacagcctgggcggaagggttcgtgtaattgtcactggagctgcccccatgtccacttcagtcatgacattcttccgggcagcaatgggatgtcaggtgtatgaagcttatggtcaaacagaatgcacaggtggctgtacatttacattacctggggactggacatcaggtcacgttggggtgcccctggcttgcaattacgtgaagctggaagatgtggctgacatgaactactttacagtgaataatgaaggagaggtctgcatcaagggtacaaacgtgttcaaaggatacctgaaggaccctgagaagacacaggaagccctggacagtgatggctggcttcacacaggagacattggtcgctggctcccgaatggaactctgaagatcatcgaccgtaaaaagaacattttcaagctggcccaaggagaatacattgcaccagagaagatagaaaatatctacaacaggagtcaaccagtgttacaaatttttgtacacggggagagcttacggtcatccttagtaggagtggtggttcctgacacagatgtacttccctcatttgcagccaagcttggggtgaagggctcctttgaggaactgtgccaaaaccaagttgtaagggaagccattttagaagacttgcagaaaattgggaaagaaagtggccttaaaacttttgaacaggtcaaagccatttttcttcatccagagccattttccattgaaaatgggctcttgacaccaacattgaaagcaaagcgaggagagctttccaaatactttcggacccaaattgacagcctgtatgagcacatccaggattaggataaggtacttaagtacctgccggcccactgtgcactgcttgtgagaaaatggattaaaaactattcttacatttgttttgcctttcctcctatttttttttaacctgttaaactctaaagccatagcttttgttttatattgagacatataatgtgtaaacttagttcccaaataaatcaatcctgtctttcccatcttcgatgttgctaatattaaggcttcagggctacttttatcaacatgcctgtcttcaagatcccagtttatgttctgtgtccttcctcatgatttccaaccttaatactattagtaaccacaagttcaagggtcaaagggaccctctgtgccttcttctttgttttgtgataaacataacttgccaacagtctctatgcttatttacatcttctactgttcaaactaagagatttttaaattctgaaaaactgcttacaattcatgttttctagccactccacaaaccactaaaattttagttttagcctatcactcatgtcaatcatatctatgagacaaatgtctccgatgctcttctgcgtaaattaaattgtgtactgaagggaaaagtttgatcataccaaacatttcctaaactctctagttagatatctgacttgggagtattaaaaattgggtctatgacatattgtccaaaaggaatgctgttcttaaagcattatttacagtaggaactggggagtaaatctgttccctacagtttgctgctgagctggaagctgtgggggaaggagttgacaggtgggcccagtgaacttttccagtaaatgaagcaagcactgaataaaaacctcctgaactgggaacaaagatctacaggcaagcaagatgcccacacaacaggcttattttctgtgaaggaaccaactgatctcccccacccttggattagagttcctgctctaccttacccacagataacacatgttgtttctacttgtaaatgtaaagtctttaaaataaactattacagatacttaaaaaaaaaaaaaaaaaaa

SEQ ID NO: 2 - DNA, 2988 bp, Homo sapiens
  gene (1)..(2988): Accession No. NM_018677
actcccccactcaccaggccccgcccctctacggaggccccgcctctagttcggcctgttttctcagtcccggcacccgccgcgaccgcaaaggcggccgcggttctaggaacttgacgtgatggggcttcctgaggagcgggtccggagcggcagcgggagccggggccaggaggaagctggagccggaggccgggcgcggagttggtctccgccgcccgaggtcagccgctccgcgcacgtcccctcgctgcagcgctaccgcgagctgcaccggcgctccgtggaggagccgcgggaattctggggagacattgccaaggaattttactggaagactccatgccctggcccattccttcggtacaactttgatgtgactaaagggaaaatcttcattgagtggatgaaaggagcaactaccaacatctgctacaatgtactggatcgaaatgtccatgagaaaaagcttggagataaagttgctttttactgggagggcaatgagccaggggagaccactcagatcacataccatcagcttctggtccaagtgtgtcagttcagcaatgttctccgaaaacagggcattcagaagggggaccgagtggccatctacatgcctatgatcccagagcttgtggtggccatgctggcatgtgcccgcattggggctttgcactccattgtgtttgcaggcttctcttcagagtctctatgtgaacggatcttggattccagctgcagtcttctcatcactacagatgccttctacaggggggaaaagcttgtgaacctgaaggagctggctgacgaggccctgcagaagtgtcaggagaagggtttcccagtaagatgctgcattgtggtcaagcacctggggcgggcagagctcggcatgggtgactccaccagccagtcccccccaattaagaggtcatgcccagatgtgcagatctcatggaaccaagggattgacttgtggtggcatgagctcatgcaagaggcaggggatgagtgtgagcccgagtggtgtgatgccgaggacccactcttcatcctgtacaccagtggctccacaggcaaacccaagggtgtggttcacacagttgggggctacatgctctatgtagccacaaccttcaagtatgtgtttgacttccatgcagaggatgtgttctggtgcacggcagacattggttggatcactggtcattcctacgtcacctatgggccactggccaatggtgccaccagtgttttgtttgaggggattcccacatatccggacgtgaaccgcctgtggagcattgtggacaaatacaaggtgaccaagttctacacagcacccacagccatccgtctgctcatgaagtttggagatgagcctgtcaccaagcatagccgggcatccttgcaggtgttaggcacagtgggtgaacccatcaaccctgaggcctggctatggtaccaccgggtggtaggtgcccagcgctgccccatcgtggacaccttctggcaaacagagacaggtggccacatgttgactccccttcctggtgccacacccatgaaacccggttctgctactttcccattctttggtgtagctcctgcaatcctgaatgagtccggggaagagttggaaggtgaagctgaaggttatctggtgttcaagcagccctggccagggatcatgcgcacagtctatgggaaccacgaacgctttgagacaacctactttaagaagtttcctggatactatgttacaggagatggctgccagcgggaccaggatggctattactggatcactggcaggattgatgacatgctcaatgtatctggacacctgctgagtacagcagaggtggagtcagcacttgtggaacatgaggctgttgcagaggcagctgtggtgggccaccctcatcctgtgaagggtgaatgcctctactgctttgtcaccttgtgtgatggccacaccttcagccccaagctcaccgaggagctcaagaagcagattagagaaaagattggccccattgccacaccagactacatccagaatgcacctggcttgcctaaaacccgctcagggaaaatcatgaggcgagtgcttcggaagattgctcagaatgaccatgacctcggggacatgtctactgtggctgacccatctgtcatcagtcacctcttcagccaccgctgcctgaccatccagtgaacatgatcctgacctttacctaggattcctcctgctccaaactttgcccatcctctttgccccctcaggagtgctgagggccagtgttgacccacactaccctcccttgaccagctgtctgggaccggaaaccagctttgtctccaggtagagacaacatcctgtgactgccaggcagaaaggacagggcccaggtcagcctcagtctgctgtgcctccagactgcagagctctcagaacccagaacagagacgaaaaggctacctctcctacccaagttaagtgttcaaaggggatgtgagggcctccactgaagcagggaggcagctgtgtaatcctatgtcagctctcttaggaagccccagtacttatattgggcatgcacttgcccttaaaaacaatgatttgtgagtccaggaacaatttactatttttaaaatattttgctgcttctgttctgggtctgaattcccttttgtgccagatgccagtactgtctgcccattggctccaggggctgtatgggcagattcagtctccagagggtattcagatcatctgcttctttgaaggagtaaatgtgttttgttcctagggccagaggagcttgtcttccttgtcctctgttcccaccctcccctgaacagaacccagcccataagagacattctcagatgaaactctgttttcttgccccagtcaggctcaagccctgtggttgtaggaataaagcctgtgatctcaagaagtggaaaaaaaaa

SEQ ID NO: 3 - DNA, 2773 bp, Homo sapiens
  gene (1)..(2773): Accession No. NM_139274
cagaatcactcttggagttagatatttaagaatccttcctgccttgacagccagtctgtgaaatgatggtgaggtgggcacttctttgtggtgagtgcagaattctggggagacattgccaaggaattttactggaagactccatgccctggcccattccttcggtacaactttgatgtgactaaagggaaaatcttcattgagtggatgaaaggagcaactaccaacatctgctacaatgtactggatcgaaatgtccatgagaaaaagcttggagataaagttgctttttactgggagggcaatgagccaggggagaccactcagatcacataccatcagcttctggtccaagtgtgtcagttcagcaatgttctccgaaaacagggcattcagaagggggaccgagtggccatctacatgcctatgatcccagagcttgtggtggccatgctggcatgtgcccgcattggggctttgcactccattgtgtttgcaggcttctcttcagagtctctatgtgaacggatcttggattccagctgcagtcttctcatcactacagatgccttctacaggggggaaaagcttgtgaacctgaaggagctggctgacgaggccctgcagaagtgtcaggagaagggtttcccagtaagatgctgcattgtggtcaagcacctggggcgggcagagctcggcatgggtgactccaccagccagtcccccccaattaagaggtcatgcccagatgtgcagatctcatggaaccaagggattgacttgtggtggcatgagctcatgcaagaggcaggggatgagtgtgagcccgagtggtgtgatgccgaggacccactcttcatcctgtacaccagtggctccacaggcaaacccaagggtgtggttcacacagttgggggctacatgctctatgtagccacaaccttcaagtatgtgtttgacttccatgcagaggatgtgttctggtgcacggcagacattggttggatcactggtcattcctacgtcacctatgggccactggccaatggtgccaccagtgttttgtttgaggggattcccacatatccggacgtgaaccgcctgtggagcattgtggacaaatacaaggtgaccaagttctacacagcacccacagccatccgtctgctcatgaagtttggagatgagcctgtcaccaagcatagccgggcatccttgcaggtgttaggcacagtgggtgaacccatcaaccctgaggcctggctatggtaccaccgggtggtaggtgcccagcgctgccccatcgtggacaccttctggcaaacagagacaggtggccacatgttgactccccttcctggtgccacacccatgaaacccggttctgctactttcccattctttggtgtagctcctgcaatcctgaatgagtccggggaagagttggaaggtgaagctgaaggttatctggtgttcaagcagccctggccagggatcatgcgcacagtctatgggaaccacgaacgctttgagacaacctactttaagaagtttcctggatactatgttacaggagatggctgccagcgggaccaggatggctattactggatcactggcaggattgatgacatgctcaatgtatctggacacctgctgagtacagcagaggtggagtcagcacttgtggaacatgaggctgttgcagaggcagctgtggtgggccaccctcatcctgtgaagggtgaatgcctctactgctttgtcaccttgtgtgatggccacaccttcagccccaagctcaccgaggagctcaagaagcagattagagaaaagattggccccattgccacaccagactacatccagaatgcacctggcttgcctaaaacccgctcagggaaaatcatgaggcgagtgcttcggaagattgctcagaatgaccatgacctcggggacatgtctactgtggctgacccatctgtcatcagtcacctcttcagccaccgctgcctgaccatccagtgaacatgatcctgacctttacctaggattcctcctgctccaaactttgcccatcctctttgccccctcaggagtgctgagggccagtgttgacccacactaccctcccttgaccagctgtctgggaccggaaaccagctttgtctccaggtagagacaacatcctgtgactgccaggcagaaaggacagggcccaggtcagcctcagtctgctgtgcctccagactgcagagctctcagaacccagaacagagacgaaaaggctacctctcctacccaagttaagtgttcaaaggggatgtgagggcctccactgaagcagggaggcagctgtgtaatcctatgtcagctctcttaggaagccccagtacttatattgggcatgcacttgcccttaaaaacaatgatttgtgagtccaggaacaatttactatttttaaaatattttgctgcttctgttctgggtctgaattcccttttgtgccagatgccagtactgtctgcccattggctccaggggctgtatgggcagattcagtctccagagggtattcagatcatctgcttctttgaaggagtaaatgtgttttgttcctagggccagaggagcttgtcttccttgtcctctgttcccaccctcccctgaacagaacccagcccataagagacattctcagatgaaactctgttttcttgccccagtcaggctcaagccctgtggttgtaggaataaagcctgtgatctcaa

SEQ ID NO: 4 - DNA, 7479 bp, Homo sapiens
  gene (1)..(7479): Accession No. NM_021638
ctgccttaaagcagaagcaaaggagtagtgcatttgttaagaagaagacgcctgaatcttttagtggacctgctttcagcaaacttgttttttaggtcagaatactatatccaatgatcaagctaaacatgaaatgcttcgagtaagactcagtattcatactttgacatttgcaaatcactgggtctaataatactcttcctcttttgttgtcagcaatggaagagttaatagttgaacttcgtctctttcttgaactcctggaccatgaatatctaacctcaactgtcagggagaaaaaggcagtgataaccaacattctgctaagaatacagtcatccaaaggttttgatgtgaaggaccatgctcagaagcaggagaccgctaacagcctgccagcccctcctcagatgcccctgccggagatccctcagccctggctgcctcctgacagtgggcctccaccattgccaacatcctccctcccagaaggttattatgaggaagctgtgccgctgagccccggaaaagctccggaatacatcacatcaaattatgattccgatgcgatgagcagctcttatgagtcgtatgatgaagaggaggaggatgggaaggggaagaaaacccggcaccagtggccctccgaggaggcctccatggacctggtcaaggacgccaaaatctgcgccttcctgctgcggaagaagcggttcggccagtggaccaagttgctctgcgtcatcaaagacaccaaactgctgtgctataaaagttccaaggaccagcagcctcagatggaactgccactccaaggctgtaacattacgtacatcccgaaagacagcaaaaagaagaagcacgagctgaagattactcagcagggcacggacccgcttgttctcgccgtccagagcaaggaacaggccgagcagtggctgaaggtgatcaaagaagcctacagtggttgtagtggccccgtggattcagagtgtcctcctccaccaagctccccggtgcacaaggcagaactggagaagaaactgtcttcagagagacccagctcagatggggagggtgttgtggaaaatggaattaccacatgtaatggaaaggagcaagtgaagaggaagaaaagttccaaatcagaggccaagggcactgtgtcgaaagtcactgggaaaaaaatcaccaagatcatcagtctgggaaagaaaaagccgtccacagacgagcagacctcctcagctgaggaagatgttcccacctgcggctatctgaacgtgctctccaacagccgctggcgagagcgctggtgccgagtgaaagataacaagctcattttccacaaggacaggaccgacctgaagacccatattgtgtctattccgctccgtggctgcgaggtgatcccgggtttggattctaaacatcctctgacgttccggctgctgcgcaacggccaggaggttgcagtattggaggcatcttcttctgaagacatgggcaggtggattgggattttactcgcagagacgggatcgtccacagacccggaggctctgcactatgactacattgatgtggagatgtctgcaagtgtcattcagacagccaaacagaccttctgtttcatgaacaggcgtgttatatctgctaacccatatctagggggcacctccaacggctatgcccaccccagcgggacggcacttcattatgacgatgtcccgtgcatcaacggctcgctcaagggtaaaaagccccccgtggcgtctaatggggtcacaggaaaagggaagactctgagcagtcagccaaagaaagcggatcccgcggctgttgtgaaaaggacgggttcgaatgctgcccagtacaagtatggcaagaaccgggtagaagcagatgccaagcggctacagaccaaagaggaggagctgctgaagaggaaagaggccctgcggaataggctggcccagctccgcaaggaaagaaaagaccttcgagcggctattgaagtgaacgccggcaggaagccgcaggcgatcctggaggagaagctgaagcagctggaggaggagtgccggcagaaggaggcggagcgtgtcagcctggagctggagctgacggaggtcaaggagagcctgaagaaagcgctggcgggcggagtcaccctggggctggccatcgagcccaagtcagggacatcgagtccacagtctccagtgttccggcaccggaccctggaaaactcgcccatctccagctgtgacaccagtgacaccgagggccccgtgccggtgaacagcgcggccgtcttgaagaagagccaggctgccccgggcagctccccctgccgagggcatgtgctgcggaaggccaaggaatgggaattgaagaacgggacctaggggacagcagcaccactccagcctcagagactgcacacccccttgcctgtatcctcatctgtgtgacggcaggaagctctgcccagagtggcctcagctgcacgactccagaggctccacgactgagctctgaggccagtgcctgtcccccaggcccacttgtattctttctactgtaaaatggcgcctttaaaaaagatgtaagactttggttcccaactttgttaaaaaacaaaaaaagtgatggaaaggtgtttgaaaggatgctatcaggcgaagtgacatctttctaaccagataggccattgctttcaccgattccaacccagccctggactgaggatggatggttccatgagcccccagatgaaaacctggattcgacagggaagagcttggatccccggctgccccgggcatgagtgtggctggccatgggcactgggctcgccttgcacgcccaccaggagggccaggggcatacgcagtcctgacgtggactttgtgtcttggcgtaccctctccacgtgcccgtccccctcgtcatcagaggtaaaggcatgagaaaatcgcgctgtgaaacgttttttaccttttattattattttttggacagatgcttttgtcaccaagacatgaaaagctgccattcttcttaacctgttttttaggaatgtctttttactgtgtgtcacacttagatcaaggagttttcagaggttccttattttattaattaattatttgtgctgcttttgacaggtagcagagggttttaatacttcactaacagtacaccctcctcccccttgggctagcatccccagcccttaatccacgtcggagccggcaggtgcttctcacaccaggagcctctgggggcaggggctggctcctcgccgctgtacaggacgtttactgctgcttggggccagggcagtcctttgaaagggaagcaagttccggaatttgttcgctcatggaactataacaccttagagcaagaggcaggaattccagggcctcctgcccctccccttcctccagcttgtcaagttaaaccactaatgtgttggtgggcctggccgtgctgcctctcctgagtagggtgggtgcaagtagggcctctttcccagctttcttgcttgccttctgtgcaatatttcttggagaatttggatgcctaaggcataaaggaaaaaaacagagttcatagtttgagctggtatttaccccctgggtttaaaaatcagattaacttcttggtctcccggaggctgctgtcaggaattctccagtacgggaagatgcagtcacttatgacgaaataagtcacccctgaacgcctccgcaggcagattcatggagaccagtcccagtagcaaccgccccttccccaagcatagaatacagaggtgccatacttggtgtaagccttccttctgtccactgtccagaatgtcctttttcacacagaggaagagatggcgggaaaacactgactgactccttgggtttcccccagacatactttcagagcgctagctgtgtggtgcacgggactttacagttaggattcatgtttaaggtggtggcgcttgaggcctgcaagggccacgttggattactgaagcggaaagcggtctcccatgtataagaaaaagttttacaacacgaattggaagctgcttgagtccacctgaacttgaattgattgcaaagccatctgctgggaacggttttgggttcctgagccatcagccagcctttctttcccctctgatgcacgttcctcccggcctagtccgtggaggcccatcacaccagcatccgtgacgccagcttcccactaggacatccaggcaggtcgggcggggacgccacacacctcagggccgtccgctgcattgccatagaggagccctccctccagtggtcacttcccaccattgcaggcagacttcccaccattgcaggcagctgggcccacttcatatcacacaaaatgaattttctataaagggaaaaaagtttgctcctccatagatttttgctgccttcgggtcaaatagtttccctggttgacactcttgggccactctgattggcagcctgctttgccaaagagaactgtgtgaggttttggtggttagtaagagaagggggagatggccagcctgaagtcacggtcctggcccagcacaggtgggcagcagcgagctggcaggtgaagtgtgagcagcacgcaaagtgtcacgtgggccttagccgtcacccaccagcttcctcaccaggcaaggaggccccggagccttagcagggacttgcccaacggcacagctgattggtgctcgactcccagcatgcatattttgttgtaaaaacccaggtttgtaattcacatccacaaccctaagccttttaaagcggaggcaaacgttaacaaaccccatcgtggtccatggagcctttcaaaatgggtgccctggaggggcctgacagtgggttccttccatggcggatactcccttgaaatttcacattccatcaaagtttaaagcatttacttcagaataagttatttatgtgtatatgttcaataaatatagtttttaatttatatctgtacatattagacacacgcgagccatcttgccagaattctgacagtgatgtcattttattcccctcccaaaacatgccccaggaacaagcaccccttgcctctgtggcagctgcgagtgtgtctgatttcataacgaagccaggctgagggcaagaggcccgacaggcaggccagggtccccggagaagccggatttcttcgcaatgtcactggtacttagcagatggtcgtgttcacaggggctagccacctgtactacggtgccgaccgcaatgcgaggaatgtggtggccacgcgatggagctggccggaggacaggtcaggtgagggggccgacccctgcggggctcagggctccttccattctaaccttgagccacagtgtcactcttcagggctctgctcctggctctattttgttaaggtgtcatcagccttcaacctccatttatatatttttataatgttaagccactgaccaactttttcatagaaacaactatcagattcgagggctccctttgtccccctgacctgggcacaggcatgggcgatggctccctcttcccagaatctgcggggaactggggcaaggcccatctgtctgcaaggctggtagctctctccctcggcttccagagtccacggcagttgcaaggtaaccagtgtggatctgctgagtcaccccaggcaccagacttaccccaggagcatgggccactgtccatggggccttccttgagaccttcccttggggctggcgggcggcggcttaccagctgggtcagtcccatctcgcccctctgtgcctatgccctggcgttgccaggcttaaccttcccctgtatcttactcatcccagaattattactggccatttctaaatagacaaaaactaccctaaaatgtggagatttactccttttgaaaagtctgtttcaaaaagtgtggcctcagctctggaggccacccccaggaaggagtttgaggttcattgtcattatggccacagtttggtgcttgtgcacgggactcaaagggcagcgtcgaagctggggttaggtgtagggttgtgagcaaagctcccctgtttgtggccacaccttccctttccaaaaaggctattaattctactcacccactatttggggggatgtaaattttgcccacagactttgccacccaggtgaggtgctgtgttcatgcacggaactgatgtcattagacaccatccaaggatgggcagcctgcagtgtggccggcgactgccatccagagaaaaggcaccttgtgccacagggcggggccgacaccctgagctcacaggtggcccctgcattcaggtggatgtccatccttgaaacagcctcttctgggaacacagcactggaggtctccaggcatcagggttggccggcagggtgccctgcagcttacataaaggtcgtggcaatgtttcaatgttaaactaaactattgccttcctcttacttttcctaaaatgattttctaatgggaacagtcacttcaagttcatgacatagtttgaaggaggataattcattttttcctggttgtcactgtcttcttatccccttggtgggctgggttcatactgtgaaataaactaaaatgaaaccaaaacgttcctgccgtaaatacgtggcacagcactgcagaaaaagcagtcacctctattcgtgagtccccaagccatagcagggcgtctgtaaaagaagggaaactgcacccaggaagtggtgggcgtcagacgcatcctttcgcccgtagttcatgaaatagttccggctttggtcttccagaaaatctcaacttcaccgtgcacaagtgttaccgggtctttttagtgtagccatggaagatactttcaaaaggacatcttcagatcataagtcttaggaccaaaggtgtttttaatgagataatctttttgattttctaacaagaaaggaaatattcactttacattttaacatcaacttttaagtgatattcagaattaattgaccatggtgatacgttgtaaaatgttttcatattaagaatgtaattatttccttattgtattttttaaaagctaaagtcatatttaaaattctctttgaaagaaacaggcaaagaaacagcaaagatttttttaaattaaatatgttagtagtgcccacttcaaatgactgtaaatatattttcactgtttctcaatgtatttaattcataaagtaaaaattttatgaaaagaaacttgcaaggaaaatcctagttttcagtccactcgccccactttgtagtagcttcactgaatttcctgctttcctggttgaattttctactgtttcacgtggtgtaaccctagactggcgcccttggcgtgcccctttgtgtatgaataaacttctctcccccagaaaaaaaaaaaaaaaa

SEQ ID NO: 5 - DNA, 2116 bp, Homo sapiens
  gene (1)..(2116): Accession No. NM_000689
atcagaaccaaattgctgagccagtcacctgtgttccaggagccgaatcagaaatgtcatcctcaggcacgccagacttacctgtcctactcaccgatttgaagattcaatatactaagatcttcataaacaatgaatggcatgattcagtgagtggcaagaaatttcctgtctttaatcctgcaactgaggaggagctctgccaggtagaagaaggagataaggaggatgttgacaaggcagtgaaggccgcaagacaggcttttcagattggatccccgtggcgtactatggatgcttccgagagggggcgactattatacaagttggctgatttaatcgaaagagatcgtctgctgctggcgacaatggagtcaatgaatggtggaaaactctattccaatgcatatctgaatgatttagcaggctgcatcaaaacattgcgctactgtgcaggttgggctgacaagatccagggccgtacaataccaattgatggaaatttttttacatatacaagacatgaacctattggtgtatgtggccaaatcattccttggaatttcccgttggttatgctcatttggaagatagggcctgcactgagctgtggaaacacagtggttgtcaaaccagcagagcaaactcctctcactgctctccacgtggcatctttaataaaagaggcagggtttcctcctggagtagtgaatattgttcctggttatgggcctacagcaggggcagccatttcttctcacatggatatagacaaagtagccttcacaggatcaacagaggttggcaagttgatcaaagaagctgccgggaaaagcaatctgaagagggtgaccctggagcttggaggaaagagcccttgcattgtgttagctgatgccgacttggacaatgctgttgaatttgcacaccatggggtattctaccaccagggccagtgttgtatagccgcatccaggatttttgtggaagaatcaatttatgatgagtttgttcgaaggagtgttgagcgggctaagaagtatatccttggaaatcctctgaccccaggagtcactcaaggccctcagattgacaaggaacaatatgataaaatacttgacctcattgagagtgggaagaaagaaggggccaaactggaatgtggaggaggcccgtgggggaataaaggctactttgtccagcccacagtgttctctaatgttacagatgagatgcgcattgccaaagaggagatttttggaccagtgcagcaaatcatgaagtttaaatctttagatgacgtgatcaaaagagcaaacaatactttctatggcttatcagcaggagtgtttaccaaagacattgataaagccataacaatctcctctgctctgcaggcaggaacagtgtgggtgaattgctatggcgtggtaagtgcccagtgcccctttggtggattcaagatgtctggaaatggaagagaactgggagagtacggtttccatgaatatacagaggtcaaaacagtcacagtgaaaatctctcagaagaactcataaagaaaatacaagagtggagagaagctcttcaatagctaagcatctccttacagtcactaatatagtagattttaaagacaaaatttttcttttcttgatttttttaaacataagctaaatcatattagtattaatactacccatagaaaacttgacatgtagcttcttctgaaagaattatttgccttctgaaatgtgacccccaagtcctatcctaaataaaaaaagacaaattcggatgtatgatctctctagctttgtcatagttatgtgattttcctttgtagctacttttgcaggataataattttatagaaaaggaacagttgcatttagcttctttcccttagtgactcttgaagtacttaacatacacgttaactgcagagtaaattgctctgttcccagtagttataaagtccttggactgttttgaaaagtttcctaggatgtcatgtctgcttgtcaaaagaaataatccctgtaatatttagctgtaaactgaatataaagcttaataaaaacaaccttgcatgaaaaaaaaaaaaaaaaaaaaa

SEQ ID NO: 6 - DNA, 5466 bp, Homo sapiens
  gene (1)..(5466): Accession No. NM_021926
gcacagccacagcctcctcgcctccccaaactcccagccaaggcgcgcggtggcgtcctcgcgccctcgctcgcgtccccgcccgccgcctgcgcaagccaggcatgaatgctgagacttgcgtctcttactgcgagtcgccggccgctgccatggacgcctactacagcccggtgtcgcagagtcgggagggctcgtcgccttttagggcatttcccggaggcgacaagttcggcacaactttcctgtcggccgccgccaaagcacagggattcggggacgccaagagccgggcccgttacggcgctgggcagcaggacctggcgacacccctggagagtggagctggggcgcggggctcctttaacaagttccagccccagccgtcgaccccgcagccccagccgccgccgcagccgcagccgcagcagcagcagccgcagccccagccgcccgcgcaaccgcatctttacttgcagcgaggcgcctgcaagacgcccccggacggcagcctcaaactccaggaaggcagcagcggccacagcgcggccttgcaggttccctgctacgctaaagagagctccctgggtgagccagagttaccccctgactctgacactgtggggatggacagcagctacctgagtgtcaaggaggctggggtgaaggggccccaggaccgggccagctcagacctccccagcccattggagaaggccgactcagagagcaacaagggcaagaagcggcggaaccggaccaccttcaccagctaccagctggaggagctggagaaggtcttccagaagacccactacccagacgtgtatgcgcgggaacagctggccatgaggacagacctcactgaggcccgcgtgcaggtctggttccagaaccgaagggccaagtggaggaagcgggagcgttttgggcagatgcagcaggttcgaacccacttctccactgcatatgagctgcccctcctcacccgagctgagaactacgcccagattcagaacccgtcctggctcggcaacaacggggctgcctcaccagtgccagcctgcgtggtcccctgcgacccggtgcctgcctgcatgtcccctcatgcccacccccctggctctggggccagcagcgtcaccgacttcctgagtgtgtctggggctggcagtcacgtgggccagacgcacatgggcagcctgtttggagcagccagcctcagcccaggcctcaatggctacgagctcaacggcgagccggaccgcaagacctcgagcatcgcggccctccgcatgaaggccaaggagcacagtgcggccatttcctgggccacatgacagggcacccctgccccgtccccacctcgggacaccatgggccacgcccatgttttccaggcccccagcctcccactcgactttcctcttaggaacctggcctgggccaggggcctgaccctcagcactttcagccgccccaagtctgaggccccgtggactgctgggagggagggggcagcaggcccctggcccctccctggcactgaggccctgacccctgctcccggccacaggcagtggagaaagccaggtggccacgtttttcagcttcgcatccatgataagctgaaagcgctttcttgctcccgcccactcctctgctctgcctagttgaccatgagtcaatgctagatttccatgcagacccagcagcctcaccagcccagtcttgtccatccttcccgctcctagtggggtcccctggtcaccaggccggtggctgtgtgtctgaagcacaggctgccctgcagagccagcctcctgccctcccatctttctctccctgaaagcacacggaatccgacctgctggggccaaggcgccagcctccacctccccccgaacagtgacgagtctgacagagcctggctgactgcatcctggctgtcccctaggctggatacacctggagagagtgggcagaggatgacaggagctggagccgaggacccctgctgccatctagcaatgccagtccccaggggagacacgggccagcccctcactggacactataggggaggagccagacctgagggaggctgagaacacagatgccacaagggctcccatggtgctagaagaaggaaaggtcctgggagagggggaggcatccgggtggggcgtgggcccgggcagtcctcccgctctccggcctgcctggcatctggtacagcggggaggtctgggcagctttgttctccatccagagcccagtcaggttccctccaggaggatgcggaggggctcgtctcttccctgccctaccctggcccctccctggggctgctcagcagtgtcccggcatggaaggactcacaacttcggaacacataagctagagcttgggggccgggtggcagagggtcaaaagctgcgtgcaggctttgctagaggacgtgtggccatgctcggcctccaggccctgctatggcctcaaactgactgtcctccctgccatatctgtcagtgtcatcgctgcccagagccttccacggcagatgggggctctgtgtccctccaggcactaggaggtgttgctcttctccacacagctttccacactccgtccttacacttcttccacagggaccaggactctctgccctctctccagcctgcggaagggctcctggcctgggctcctcggtgtggctttgctattgcaaatggggctgtcaggatgccctcctgaaaccaggcttcctgcctccaggaagcggggctctgtgcctgcctgcccgacccctgtagcttgggtctggccctgagccccagccctcacctcagctgggagtacacagtaaccgtccagaggcaggcctgtcagaccccaggtggggggtccctccagcaggcagcgccccgcattgaagcgctcgccttttctaccttctcccttgattcctgtcatggagtagggccaggcccactatgctcagggtcgtggacacagaaaggcctcctgggttgggcggagggtaaacttggtgttgttgaatgagggtctctggggttgggggtgacagtctcccgcctgcctggtgttctcatctgctctagaaaccaggctgaggaagggtctggctgtggcctcccttaatgagtcagacctctttgtgaaccgtagctctaaaatggatcttatagaggtgaaagggtcttggacattgaattaaatgttcttggaggcttggctttaagtgtttcaaatatttgaggatttggagtgacttttgggaagttttttctagttctgaggttcgctgaaatgacccagactcccccaaaatctagccagggaaaggaagaacttaaggctgggaacagtttccccatttctcccccctttccttctgaaatgctcatggctgaggaaggatggggaaggaaggaactttcaccttgggtctttctcacccatgagagaatcaggacaaagaggaggagagccaggtagctccagagtgggccaggagggagagcaagggaatcaggacaaagaggaggacagacaggtagctccagagcaggcagggagggagagtgagagctttaagggggctcttccgcagtggcccccggcactcagttcctccatgcgtctgctctctggctgggctagacccaagtcaggcaaatttcaacccaaaagcttgagaagaaaaggcgtctattagaagactctgtggctatggctgcctgtcccaacacacccaggaagtgtctaggattaaacatgccaatgtgaaacattcctgttcatctcgtcaaaggcagccacgtaccccaggcctgtcctctgtggcttggcccagcccttgggggccacctaaccacactaagtatgataggaccaccgagttgggaggaagcttagaaaccctctagttagtccagtcccttcacaacagagaagaccctggcccagagtggagacatgactgccctgacctgtacttgccctgagactaggctgagagaggagcctgggacgtgccacccagggtgtgagggcctgggcttcgttggcaccaggggcggccggtgctgcatggagctcccctctccaatgcctcatgggcattcactcagcagctcagttctccagaagagaaccttggggcccagtcccttccaagacaggtggctaggcccaaccttctgcactgcagagcagggggccactgccgtgtcagctcctaggatgactgagcaagtcagggcagctgcccaaggccatctggagctaaagctcatgaaggcaggtggagagaagcatctacctgccacgtggttcattgctatgcgaataagctaagagaggtgaggatttcctttggatacctgcctaagatctcaacagagatggcaacttaaaaataaagtcgtgggtagccggcagatggatgggcagcctccccacactgacagcctccagtccctgctgggcacaggtctcagcatggcaaggcttgacactaaggtgctgctactgccctccagatgccagcactactcctggggcatgggagcgagggctctggggggcacacagagaggcttgtctccaaggctgaaatagcacttggaggacatgggcttttagaactttccttgaattcttttaactatacttgattctcagcgctcactaccgtgcctccagcttcgggaagcacggtggccaggttagctcaaagacactgcgatggggtaggtgcagcaagtgtggggtgggtccccagcacacacagctgtgatcacactggacccagctccgtgccccatctcctgtcatttcggctgggcagacgagggacgcttccatgaaaactacgtaccctgcttatgcagtcattccctccctgggctagacagtggggggccatcttcgagaacctgaaagacacgcgggggttcctggtctgtttcatggcccttactgtccagtgcaaaggcaaacaggcctagctgggggaggatggttggtaaactggcccccaggataatactctgtgactatccagttaaaaaataagaaggtgacaatgacccatcaaccccacttcacttctttcaggatgctgtagggaggaaaggtgcttccatgacctaacctcggcctctcctttcttccctcttcactcacacacatagagctaggcctttatactactgattttgaaggacagttttcaatgtctaatcatctgtttaggtgtgcagtggttgaaaaaagaaagctgagtgctagaaggaacatgaacctcaaccgttacttattgttctcattgtaagatattttaaccctgtataaatgcaacttttcctttagcttaatggcctggggtggaatattaaaaatatatattaaaaatacagtaaaaatccagaaaaatgt

SEQ ID NO: 7 - DNA, 10730 bp, Homo sapiens
  gene (1)..(10730): Accession No. NM_000038
gtattggtgcagcccgccagggtgtcactggagacagaatggaggtgctgccggactcggaaatggggtccaagggtagccaaggatggctgcagcttcatatgatcagttgttaaagcaagttgaggcactgaagatggagaactcaaatcttcgacaagagctagaagataattccaatcatcttacaaaactggaaactgaggcatctaatatgaaggaagtacttaaacaactacaaggaagtattgaagatgaagctatggcttcttctggacagattgatttattagagcgtcttaaagagcttaacttagatagcagtaatttccctggagtaaaactgcggtcaaaaatgtccctccgttcttatggaagccgggaaggatctgtatcaagccgttctggagagtgcagtcctgttcctatgggttcatttccaagaagagggtttgtaaatggaagcagagaaagtactggatatttagaagaacttgagaaagagaggtcattgcttcttgctgatcttgacaaagaagaaaaggaaaaagactggtattacgctcaacttcagaatctcactaaaagaatagatagtcttcctttaactgaaaatttttccttacaaacagatatgaccagaaggcaattggaatatgaagcaaggcaaatcagagttgcgatggaagaacaactaggtacctgccaggatatggaaaaacgagcacagcgaagaatagccagaattcagcaaatcgaaaaggacatacttcgtatacgacagcttttacagtcccaagcaacagaagcagagaggtcatctcagaacaagcatgaaaccggctcacatgatgctgagcggcagaatgaaggtcaaggagtgggagaaatcaacatggcaacttctggtaatggtcagggttcaactacacgaatggaccatgaaacagccagtgttttgagttctagtagcacacactctgcacctcgaaggctgacaagtcatctgggaaccaaggtggaaatggtgtattcattgttgtcaatgcttggtactcatgataaggatgatatgtcgcgaactttgctagctatgtctagctcccaagacagctgtatatccatgcgacagtctggatgtcttcctctcctcatccagcttttacatggcaatgacaaagactctgtattgttgggaaattcccggggcagtaaagaggctcgggccagggccagtgcagcactccacaacatcattcactcacagcctgatgacaagagaggcaggcgtgaaatccgagtccttcatcttttggaacagatacgcgcttactgtgaaacctgttgggagtggcaggaagctcatgaaccaggcatggaccaggacaaaaatccaatgccagctcctgttgaacatcagatctgtcctgctgtgtgtgttctaatgaaactttcatttgatgaagagcatagacatgcaatgaatgaactagggggactacaggccattgcagaattattgcaagtggactgtgaaatgtatgggcttactaatgaccactacagtattacactaagacgatatgctggaatggctttgacaaacttgacttttggagatgtagccaacaaggctacgctatgctctatgaaaggctgcatgagagcacttgtggcccaactaaaatctgaaagtgaagacttacagcaggttattgcgagtgttttgaggaatttgtcttggcgagcagatgtaaatagtaaaaagacgttgcgagaagttggaagtgtgaaagcattgatggaatgtgctttagaagttaaaaaggaatcaaccctcaaaagcgtattgagtgccttatggaatttgtcagcacattgcactgagaataaagctgatatatgtgctgtagatggtgcacttgcatttttggttggcactcttacttaccggagccagacaaacactttagccattattgaaagtggaggtgggatattacggaatgtgtccagcttgatagctacaaatgaggaccacaggcaaatcctaagagagaacaactgtctacaaactttattacaacacttaaaatctcatagtttgacaatagtcagtaatgcatgtggaactttgtggaatctctcagcaagaaatcctaaagaccaggaagcattatgggacatgggggcagttagcatgctcaagaacctcattcattcaaagcacaaaatgattgctatgggaagtgctgcagctttaaggaatctcatggcaaataggcctgcgaagtacaaggatgccaatattatgtctcctggctcaagcttgccatctcttcatgttaggaaacaaaaagccctagaagcagaattagatgctcagcacttatcagaaacttttgacaatatagacaatttaagtcccaaggcatctcatcgtagtaagcagagacacaagcaaagtctctatggtgattatgtttttgacaccaatcgacatgatgataataggtcagacaattttaatactggcaacatgactgtcctttcaccatatttgaatactacagtgttacccagctcctcttcatcaagaggaagcttagatagttctcgttctgaaaaagatagaagtttggagagagaacgcggaattggtctaggcaactaccatccagcaacagaaaatccaggaacttcttcaaagcgaggtttgcagatctccaccactgcagcccagattgccaaagtcatggaagaagtgtcagccattcatacctctcaggaagacagaagttctgggtctaccactgaattacattgtgtgacagatgagagaaatgcacttagaagaagctctgctgcccatacacattcaaacacttacaatttcactaagtcggaaaattcaaataggacatgttctatgccttatgccaaattagaatacaagagatcttcaaatgatagtttaaatagtgtcagtagtagtgatggttatggtaaaagaggtcaaatgaaaccctcgattgaatcctattctgaagatgatgaaagtaagttttgcagttatggtcaatacccagccgacctagcccataaaatacatagtgcaaatcatatggatgataatgatggagaactagatacaccaataaattatagtcttaaatattcagatgagcagttgaactctggaaggcaaagtccttcacagaatgaaagatgggcaagacccaaacacataatagaagatgaaataaaacaaagtgagcaaagacaatcaaggaatcaaagtacaacttatcctgtttatactgagagcactgatgataaacacctcaagttccaaccacattttggacagcaggaatgtgtttctccatacaggtcacggggagccaatggttcagaaacaaatcgagtgggttctaatcatggaattaatcaaaatgtaagccagtctttgtgtcaagaagatgactatgaagatgataagcctaccaattatagtgaacgttactctgaagaagaacagcatgaagaagaagagagaccaacaaattatagcataaaatataatgaagagaaacgtcatgtggatcagcctattgattatagtttaaaatatgccacagatattccttcatcacagaaacagtcattttcattctcaaagagttcatctggacaaagcagtaaaaccgaacatatgtcttcaagcagtgagaatacgtccacaccttcatctaatgccaagaggcagaatcagctccatccaagttctgcacagagtagaagtggtcagcctcaaaaggctgccacttgcaaagtttcttctattaaccaagaaacaatacagacttattgtgtagaagatactccaatatgtttttcaagatgtagttcattatcatctttgtcatcagctgaagatgaaataggatgtaatcagacgacacaggaagcagattctgctaataccctgcaaatagcagaaataaaagaaaagattggaactaggtcagctgaagatcctgtgagcgaagttccagcagtgtcacagcaccctagaaccaaatccagcagactgcagggttctagtttatcttcagaatcagccaggcacaaagctgttgaattttcttcaggagcgaaatctccctccaaaagtggtgctcagacacccaaaagtccacctgaacactatgttcaggagaccccactcatgtttagcagatgtacttctgtcagttcacttgatagttttgagagtcgttcgattgccagctccgttcagagtgaaccatgcagtggaatggtaagtggcattataagccccagtgatcttccagatagccctggacaaaccatgccaccaagcagaagtaaaacacctccaccacctcctcaaacagctcaaaccaagcgagaagtacctaaaaataaagcacctactgctgaaaagagagagagtggacctaagcaagctgcagtaaatgctgcagttcagagggtccaggttcttccagatgctgatactttattacattttgccacggaaagtactccagatggattttcttgttcatccagcctgagtgctctgagcctcgatgagccatttatacagaaagatgtggaattaagaataatgcctccagttcaggaaaatgacaatgggaatgaaacagaatcagagcagcctaaagaatcaaatgaaaaccaagagaaagaggcagaaaaaactattgattctgaaaaggacctattagatgattcagatgatgatgatattgaaatactagaagaatgtattatttctgccatgccaacaaagtcatcacgtaaagcaaaaaagccagcccagactgcttcaaaattacctccacctgtggcaaggaaaccaagtcagctgcctgtgtacaaacttctaccatcacaaaacaggttgcaaccccaaaagcatgttagttttacaccgggggatgatatgccacgggtgtattgtgttgaagggacacctataaacttttccacagctacatctctaagtgatctaacaatcgaatcccctccaaatgagttagctgctggagaaggagttagaggaggggcacagtcaggtgaatttgaaaaacgagataccattcctacagaaggcagaagtacagatgaggctcaaggaggaaaaacctcatctgtaaccatacctgaattggatgacaataaagcagaggaaggtgatattcttgcagaatgcattaattctgctatgcccaaagggaaaagtcacaagcctttccgtgtgaaaaagataatggaccaggtccagcaagcatctgcgtcttcttctgcacccaacaaaaatcagttagatggtaagaaaaagaaaccaacttcaccagtaaaacctataccacaaaatactgaatataggacacgtgtaagaaaaaatgcagactcaaaaaataatttaaatgctgagagagttttctcagacaacaaagattcaaagaaacagaatttgaaaaataattccaaggtcttcaatgataagctcccaaataatgaagatagagtcagaggaagttttgcttttgattcacctcatcattacacgcctattgaaggaactccttactgtttttcacgaaatgattctttgagttctctagattttgatgatgatgatgttgacctttccagggaaaaggctgaattaagaaaggcaaaagaaaataaggaatcagaggctaaagttaccagccacacagaactaacctccaaccaacaatcagctaataagacacaagctattgcaaagcagccaataaatcgaggtcagcctaaacccatacttcagaaacaatccacttttccccagtcatccaaagacataccagacagaggggcagcaactgatgaaaagttacagaattttgctattgaaaatactccggtttgcttttctcataattcctctctgagttctctcagtgacattgaccaagaaaacaacaataaagaaaatgaacctatcaaagagactgagccccctgactcacagggagaaccaagtaaacctcaagcatcaggctatgctcctaaatcatttcatgttgaagataccccagtttgtttctcaagaaacagttctctcagttctcttagtattgactctgaagatgacctgttgcaggaatgtataagctccgcaatgccaaaaaagaaaaagccttcaagactcaagggtgataatgaaaaacatagtcccagaaatatgggtggcatattaggtgaagatctgacacttgatttgaaagatatacagagaccagattcagaacatggtctatcccctgattcagaaaattttgattggaaagctattcaggaaggtgcaaattccatagtaagtagtttacatcaagctgctgctgctgcatgtttatctagacaagcttcgtctgattcagattccatcctttccctgaaatcaggaatctctctgggatcaccatttcatcttacacctgatcaagaagaaaaaccctttacaagtaataaaggcccacgaattctaaaaccaggggagaaaagtacattggaaactaaaaagatagaatctgaaagtaaaggaatcaaaggaggaaaaaaagtttataaaagtttgattactggaaaagttcgatctaattcagaaatttcaggccaaatgaaacagccccttcaagcaaacatgccttcaatctctcgaggcaggacaatgattcatattccaggagttcgaaatagctcctcaagtacaagtcctgtttctaaaaaaggcccaccccttaagactccagcctccaaaagccctagtgaaggtcaaacagccaccacttctcctagaggagccaagccatctgtgaaatcagaattaagccctgttgccaggcagacatcccaaataggtgggtcaagtaaagcaccttctagatcaggatctagagattcgaccccttcaagacctgcccagcaaccattaagtagacctatacagtctcctggccgaaactcaatttcccctggtagaaatggaataagtcctcctaacaaattatctcaacttccaaggacatcatcccctagtactgcttcaactaagtcctcaggttctggaaaaatgtcatatacatctccaggtagacagatgagccaacagaaccttaccaaacaaacaggtttatccaagaatgccagtagtattccaagaagtgagtctgcctccaaaggactaaatcagatgaataatggtaatggagccaataaaaaggtagaactttctagaatgtcttcaactaaatcaagtggaagtgaatctgatagatcagaaagacctgtattagtacgccagtcaactttcatcaaagaagctccaagcccaaccttaagaagaaaattggaggaatctgcttcatttgaatctctttctccatcatctagaccagcttctcccactaggtcccaggcacaaactccagttttaagtccttcccttcctgatatgtctctatccacacattcgtctgttcaggctggtggatggcgaaaactcccacctaatctcagtcccactatagagtataatgatggaagaccagcaaagcgccatgatattgcacggtctcattctgaaagtccttctagacttccaatcaataggtcaggaacctggaaacgtgagcacagcaaacattcatcatcccttcctcgagtaagcacttggagaagaactggaagttcatcttcaattctttctgcttcatcagaatccagtgaaaaagcaaaaagtgaggatgaaaaacatgtgaactctatttcaggaaccaaacaaagtaaagaaaaccaagtatccgcaaaaggaacatggagaaaaataaaagaaaatgaattttctcccacaaatagtacttctcagaccgtttcctcaggtgctacaaatggtgctgaatcaaagactctaatttatcaaatggcacctgctgtttctaaaacagaggatgtttgggtgagaattgaggactgtcccattaacaatcctagatctggaagatctcccacaggtaatactcccccggtgattgacagtgtttcagaaaaggcaaatccaaacattaaagattcaaaagataatcaggcaaaacaaaatgtgggtaatggcagtgttcccatgcgtaccgtgggtttggaaaatcgcctgaactcctttattcaggtggatgcccctgaccaaaaaggaactgagataaaaccaggacaaaataatcctgtccctgtatcagagactaatgaaagttctatagtggaacgtaccccattcagttctagcagctcaagcaaacacagttcacctagtgggactgttgctgccagagtgactccttttaattacaacccaagccctaggaaaagcagcgcagatagcacttcagctcggccatctcagatcccaactccagtgaataacaacacaaagaagcgagattccaaaactgacagcacagaatccagtggaacccaaagtcctaagcgccattctgggtcttaccttgtgacatctgtttaaaagagaggaagaatgaaactaagaaaattctatgttaattacaactgctatatagacattttgtttcaaatgaaactttaaaagactgaaaaattttgtaaataggtttgattcttgttagagggtttttgttctggaagccatatttgatagtatactttgtcttcactggtcttattttgggaggcactcttgatggttaggaaaaaaatagtaaagccaagtatgtttgtacagtatgttttacatgtatttaaagtagcatcccatcccaacttcctttaattattgcttgtcttaaaataatgaacactacagatagaaaatatgatatattgctgttatcaatcatttctagattataaactgactaaacttacatcagggaaaaattggtatttatgcaaaaaaaaatgtttttgtccttgtgagtccatctaacatcataattaatcatgtggctgtgaaattcacagtaatatggttcccgatgaacaagtttacccagcctgctttgctttactgcatgaatgaaactgatggttcaatttcagaagtaatgattaacagttatgtggtcacatgatgtgcatagagatagctacagtgtaataatttacactattttgtgctccaaacaaaacaaaaatctgtgtaactgtaaaacattgaatgaaactattttacctgaactagattttatctgaaagtaggtagaatttttgctatgctgtaatttgttgtatattctggtatttgaggtgagatggctgctcttttattaatgagacatgaattgtgtctcaacagaaactaaatgaacatttcagaataaattattgctgtatgtaaactgttactgaaattggtatttgtttgaagggtcttgtttcacatttgtattaataattgtttaaaatgcctcttttaaaagcttatataaatttttttcttcagcttctatgcattaagagtaaaattcctcttactgtaataaaaacaattgaagaagactgttgccacttaaccattccatgcgttggcacttatctattcctgaaatttcttttatgtgattagctcatcttgatttttaatatttttccacttaaacttttttttcttactccactggagctcagtaaaagtaaattcatgtaatagcaatgcaagcagcctagcacagactaagcattgagcataataggcccacataatttcctctttcttaatattatagaattctgtacttgaaattgattcttagacattgcagtctcttcgaggctttacagtgtaaactgtcttgccccttcatcttcttgttgcaactgggtctgacatgaacactttttatcaccctgtatgttagggcaagatctcagcagtgaagtataatcagcactttgccatgctcagaaaattcaaatcacatggaactttagaggtagatttaatacgattaagatattcagaagtatattttagaatccctgcctgttaaggaaactttatttgtggtaggtacagttctggggtacatgttaagtgtccccttatacagtggagggaagtcttccttcctgaaggaaaataaactgacacttattaactaagataatttacttaatatatcttccctgatttgttttaaaagatcagagggtgactgatgatacatgcatacatatttgttgaataaatgaaaatttatttttagtgataagattcatacactctgtatttggggagggaaaacctttttaagcatggtggggcactcagataggagtgaatacacctacctggtgccttgaaaatcacatcaagtagttaattatctaccccttacctgtgtttataacttccaggtaatgagaatgattttttttaaagctaaaatgccagtaaataaaagtgctatgacttgagctaagatatttgactccaatgcctgtactgtgtctactgcaccactttgtaaacacttcaatttactatctttgaaatgattgacctttaaatttttgccaaatgttatctgaaattgtctatgaataccatctacttctgttgttttcccaggcttccataaacaatggagatacatgca

SEQ ID NO: 8 - DNA, 4241 bp, Homo sapiens
  gene (1)..(4241): Accession No. NM_004655
actggctccgcgagcctggcccgggggagtcggctggagccggctgcgctttgataaggtcctggcaactcagtaacagcccgagagccgggaaataaaaataacccctcagagcgatggatttcggggccgcccggcggccgaggcgcccgccgaaggccctgctgtaaaagagaggaggttcagatgagcccctgctgacttgagagagacagagagaccacgccgattgctgagaggaactggaagaagaaaaattcccagactcagtgggaagagctccctcaccatgagtagcgctatgttggtgacttgcctcccggaccccagcagcagcttccgtgaggatgccccgcggcccccagtgccaggggaagaaggggagaccccaccgtgtcagccaggggtgggcaagggccaggtcaccaaacccatgcctgtctcttccaacaccaggcggaacgaagatgggttgggggagccggaggggcgggcatctccggattcccctctgacccggtggaccaagtccttacactccttattgggcgatcaagacggtgcttacctgttccgaactttcctggagagggagaaatgcgtggataccttagacttctggtttgcctgcaatggattcaggcagatgaacctgaaggataccaaaactttacgagtagccaaagcgatctacaaaaggtacattgagaacaacagcattgtctccaagcagctgaagcctgccaccaagacctacataagagatggcatcaagaagcagcagattgattccatcatgtttgaccaggcgcagaccgagatccagtcggtgatggaggaaaatgcctaccagatgtttttgacttctgatatatacctcgaatatgtgaggagtgggggagaaaacacagcttacatgagtaatgggggactcgggagcctaaaggtcgtgtgtggctatctccccaccttgaatgaagaagaggagtggacttgtgccgacttcaagtgcaaactttcgccaaccgtggttggcttgtccagcaaaactctgagggccacggcgagtgtgaggtccacggaaactgttgacagtggatacaggtccttcaagaggagcgatcctgttaatccttatcacataggttctggctatgtctttgcaccagccaccagcgccaacgacagtgagatatccagtgatgcgctgacggatgattccatgtccatgacggacagcagtgtagatggaattcctccttatcgtgtgggcagtaagaaacagctccagagagaaatgcatcgcagtgtgaaggccaatggccaagtgtctctacctcatttcccgagaacccaccgcctgcccaaggagatgacccccgtggaacccgccacctttgcagctgagctgatctcgaggctggaaaagctgaagctggagttggagagccgccacagcctggaggagcgcctgcagcagatccgagaggatgaagagagagagggctccgagctcacactcaattcgcgggagggggcgcccacgcagcaccccctctccctactgccctccggcagctacgaggaagacccgcagacgatactggacgatcacctgtccagggtcctcaagacccctggctgccagtctccaggcgtaggccgctatagcccccgctcccgctccccggaccaccaccaccaccaccattcgcagtaccactccctgctcccgcccggtggcaagctgcctcccgcggccgcctcgccgggcgcctgccccctcctcgggggcaaaggctttgtgaccaagcagacgacgaagcatgtccaccaccactacatccaccaccatgccgtccccaagaccaaggaggagatcgaggcggaggccacgcagcgggtgcactgcttctgccctgggggcagcgagtattactgctactcgaaatgcaaaagccactccaaggctccggaaaccatgcccagcgagcagtttggcggcagcagaggcagtaccttgcccaaacgcaatgggaaaggcacggagccgggcctggccctgcccgccagggaaggaggggcccccggcggagctggggccctgcagcttccccgggaggaaggagacaggtcgcaggatgtctggcagtggatgctggagagtgagcggcagagcaagcccaagccccatagtgcccaaagcacaaaaaaggcctaccccttggagtctgcccgctcgtctccaggcgaacgagccagccggcaccatctgtgggggggcaacagcgggcacccccgcaccaccccccgtgcccacctgttcacccaggaccctgcgatgcctcccctgaccccacccaacacgctggctcagctggaggaggcctgtcgcaggctagctgaggtgtcgaagcccccaaagcagcggtgctgtgtggccagtcagcagagggacaggaatcattcggccactgttcagacgggagccacacccttctccaatccaagcctggctccagaagatcacaaagagccaaagaaactggcaggtgtccacgcgctccaggccagtgagttggttgtcacttactttttctgtggggaagaaattccataccggaggatgctgaaggctcagagcttgaccctgggccactttaaagagcagctcagcaaaaagggaaattataggtattacttcaaaaaagcaagcgatgagtttgcctgtggagcggtgtttgaggagatctgggaggatgagacggtgctcccgatgtatgaaggccggattctgggcaaagtggagcggatcgattgagccctggggtctggctttggtgaactgttggagcccgaagctcttgtgaactgtcttggctgtgagcaactgcgacaaaacattttgaaggaaaattaaaccaatgaagaagacaaagtctaaggaagaatcggccagtgggccttcgggagggcggggggaggttgattttcatgattcatgagctgggtactgactgagataagaaaagcctgaactatttattaaaaacatgaccactcttggctattgaagatgctgcctgtatttgagagactgccatacataatatatgacttcctagggatctgaaatccataaactaagagaaactgtgtatagcttacctgaacaggaatccttactgatatttatagaacagttgatttcccccatccccagtttatggatatgctgctttaaacttggaagggggagacaggaagttttaattgttctgactaaacttaggagttgagctaggagtgcgttcatggtttcttcactaacagaggaattatgctttgcactacgtccctccaagtgaagacagactgttttagacagactttttaaaatggtgccctaccattgacacatgcagaaattggtgcgttttgtttttttttttcctatgctgctctgttttgtcttaaaggtcttgagggttgaccatgttgcgtcatcatcaacattttgggggttgtgttggatgggatgatctgttgcagagggagaggcagggaaccctgctccttcgggccccaggttgatcctgtgactgaggctccccctcatgtagcctccccaggcccagggccctgaggcctgctagaatcactgccgctgtgctttcgtggaaatgacagttccttgttttttttgtttctgtttttgttttacattagtcattggaccacagccattcaggaactaccccctgccccacaaagaaatgaacagttgtagggagacccagcagcacctttcctccacacaccttcattttgatgttcgggtttttgtgttaagttaatctgtacattctgtttgccattgttacttgtactatacatctgtatatagtgtacggcaaaagagtattaatccactatctctagtgcttgactttaaatcagtacagtacctgtacctgcacggtcacccgctccgtgtgtcgccctatattgagggctcaagctttcccttgttttttgaaaggggtttatgtataaatatattttatgcctttttattacaagtcttgtactcaatgacttttgtcatgacattttgttctacttatactgtaaattatgcattataaagagttcatttaaggaaaattacttggtacaataattattgtaattaagagatgtagcctttattaaaattttatatttttcaaaaaaaaaaa

SEQ ID NO: 9 - DNA, 888 bp, Homo sapiens
  gene (1)..(888): Accession No. NM_138761
tcacgtgacccgggcgcgctgcggccgcccgcgcggacccggcgagaggcggcggcgggagcggcggtgatggacgggtccggggagcagcccagaggcggggggcccaccagctctgagcagatcatgaagacaggggcccttttgcttcagggtttcatccaggatcgagcagggcgaatggggggggaggcacccgagctggccctggacccggtgcctcaggatgcgtccaccaagaagctgagcgagtgtctcaagcgcatcggggacgaactggacagtaacatggagctgcagaggatgattgccgccgtggacacagactccccccgagaggtctttttccgagtggcagctgacatgttttctgacggcaacttcaactggggccgggttgtcgcccttttctactttgccagcaaactggtgctcaaggccctgtgcaccaaggtgccggaactgatcagaaccatcatgggctggacattggacttcctccgggagcggctgttgggctggatccaagaccagggtggttgggacggcctcctctcctactttgggacgcccacgtggcagaccgtgaccatctttgtggcgggagtgctcaccgcctcactcaccatctggaagaagatgggctgaggcccccagctgccttggactgtgtttttcctccataaattatggcatttttctgggaggggtggggattgggggacgtgggcatttttcttacttttgtaattattggggggtgtggggaagagtggtcttgagggggtaataaacctccttcgggacacaaaaaaaaaaaaaaaaaaaaaaaaaaaaaaaaaaaaaaaaaaaaaaaaaaaaaaaaaaaaaaaaaaaaaaaaaaaaaaa

SEQ ID NO: 10 - DNA, 6492 bp, Homo sapiens
  gene (1)..(6492): Accession No. NM_000633
tttctgtgaagcagaagtctgggaatcgatctggaaatcctcctaatttttactccctctccccgcgactcctgattcattgggaagtttcaaatcagctataactggagagtgctgaagattgatgggatcgttgccttatgcatttgttttggttttacaaaaaggaaacttgacagaggatcatgctgtacttaaaaaatacaacatcacagaggaagtagactgatattaacaatacttactaataataacgtgcctcatgaaataaagatccgaaaggaattggaataaaaatttcctgcatctcatgccaagggggaaacaccagaatcaagtgttccgcgtgattgaagacaccccctcgtccaagaatgcaaagcacatccaataaaatagctggattataactcctcttctttctctgggggccgtggggtgggagctggggcgagaggtgccgttggcccccgttgcttttcctctgggaaggatggcgcacgctgggagaacagggtacgataaccgggagatagtgatgaagtacatccattataagctgtcgcagaggggctacgagtgggatgcgggagatgtgggcgccgcgcccccgggggccgcccccgcaccgggcatcttctcctcccagcccgggcacacgccccatccagccgcatcccgggacccggtcgccaggacctcgccgctgcagaccccggctgcccccggcgccgccgcggggcctgcgctcagcccggtgccacctgtggtccacctgaccctccgccaggccggcgacgacttctcccgccgctaccgccgcgacttcgccgagatgtccagccagctgcacctgacgcccttcaccgcgcggggacgctttgccacggtggtggaggagctcttcagggacggggtgaactgggggaggattgtggccttctttgagttcggtggggtcatgtgtgtggagagcgtcaaccgggagatgtcgcccctggtggacaacatcgccctgtggatgactgagtacctgaaccggcacctgcacacctggatccaggataacggaggctgggatgcctttgtggaactgtacggccccagcatgcggcctctgtttgatttctcctggctgtctctgaagactctgctcagtttggccctggtgggagcttgcatcaccctgggtgcctatctgggccacaagtgaagtcaacatgcctgccccaaacaaatatgcaaaaggttcactaaagcagtagaaataatatgcattgtcagtgatgtaccatgaaacaaagctgcaggctgtttaagaaaaaataacacacatataaacatcacacacacagacagacacacacacacacaacaattaacagtcttcaggcaaaacgtcgaatcagctatttactgccaaagggaaatatcatttattttttacattattaagaaaaaaagatttatttatttaagacagtcccatcaaaactcctgtctttggaaatccgaccactaattgccaagcaccgcttcgtgtggctccacctggatgttctgtgcctgtaaacatagattcgctttccatgttgttggccggatcaccatctgaagagcagacggatggaaaaaggacctgatcattggggaagctggctttctggctgctggaggctggggagaaggtgttcattcacttgcatttctttgccctgggggctgtgatattaacagagggagggttcctgtggggggaagtccatgcctccctggcctgaagaagagactctttgcatatgactcacatgatgcatacctggtgggaggaaaagagttgggaacttcagatggacctagtacccactgagatttccacgccgaaggacagcgatgggaaaaatgcccttaaatcataggaaagtatttttttaagctaccaattgtgccgagaaaagcattttagcaatttatacaatatcatccagtaccttaagccctgattgtgtatattcatatattttggatacgcaccccccaactcccaatactggctctgtctgagtaagaaacagaatcctctggaacttgaggaagtgaacatttcggtgacttccgcatcaggaaggctagagttacccagagcatcaggccgccacaagtgcctgcttttaggagaccgaagtccgcagaacctgcctgtgtcccagcttggaggcctggtcctggaactgagccggggccctcactggcctcctccagggatgatcaacagggcagtgtggtctccgaatgtctggaagctgatggagctcagaattccactgtcaagaaagagcagtagaggggtgtggctgggcctgtcaccctggggccctccaggtaggcccgttttcacgtggagcatgggagccacgacccttcttaagacatgtatcactgtagagggaaggaacagaggccctgggcccttcctatcagaaggacatggtgaaggctgggaacgtgaggagaggcaatggccacggcccattttggctgtagcacatggcacgttggctgtgtggccttggcccacctgtgagtttaaagcaaggctttaaatgactttggagagggtcacaaatcctaaaagaagcattgaagtgaggtgtcatggattaattgacccctgtctatggaattacatgtaaaacattatcttgtcactgtagtttggttttatttgaaaacctgacaaaaaaaaagttccaggtgtggaatatgggggttatctgtacatcctggggcattaaaaaaaaaatcaatggtggggaactataaagaagtaacaaaagaagtgacatcttcagcaaataaactaggaaatttttttttcttccagtttagaatcagccttgaaacattgatggaataactctgtggcattattgcattatataccatttatctgtattaactttggaatgtactctgttcaatgtttaatgctgtggttgatatttcgaaagctgctttaaaaaaatacatgcatctcagcgtttttttgtttttaattgtatttagttatggcctatacactatttgtgagcaaaggtgatcgttttctgtttgagatttttatctcttgattcttcaaaagcattctgagaaggtgagataagccctgagtctcagctacctaagaaaaacctggatgtcactggccactgaggagctttgtttcaaccaagtcatgtgcatttccacgtcaacagaattgtttattgtgacagttatatctgttgtccctttgaccttgtttcttgaaggtttcctcgtccctgggcaattccgcatttaattcatggtattcaggattacatgcatgtttggttaaacccatgagattcattcagttaaaaatccagatggcaaatgaccagcagattcaaatctatggtggtttgacctttagagagttgctttacgtggcctgtttcaacacagacccacccagagccctcctgccctccttccgcgggggctttctcatggctgtccttcagggtcttcctgaaatgcagtggtgcttacgctccaccaagaaagcaggaaacctgtggtatgaagccagacctccccggcgggcctcagggaacagaatgatcagacctttgaatgattctaatttttaagcaaaatattattttatgaaaggtttacattgtcaaagtgatgaatatggaatatccaatcctgtgctgctatcctgccaaaatcattttaatggagtcagtttgcagtatgctccacgtggtaagatcctccaagctgctttagaagtaacaatgaagaacgtggacgtttttaatataaagcctgttttgtcttttgttgttgttcaaacgggattcacagagtatttgaaaaatgtatatatattaagaggtcacgggggctaattgctggctggctgccttttgctgtggggttttgttacctggttttaataacagtaaatgtgcccagcctcttggccccagaactgtacagtattgtggctgcacttgctctaagagtagttgatgttgcattttccttattgttaaaaacatgttagaagcaatgaatgtatataaaagcctcaactagtcatttttttctcctcttcttttttttcattatatctaattattttgcagttgggcaacagagaaccatccctattttgtattgaagagggattcacatctgcatcttaactgctctttatgaatgaaaaaacagtcctctgtatgtactcctctttacactggccagggtcagagttaaatagagtatatgcactttccaaattggggacaagggctctaaaaaaagccccaaaaggagaagaacatctgagaacctcctcggccctcccagtccctcgctgcacaaatactccgcaagagaggccagaatgacagctgacagggtctatggccatcgggtcgtctccgaagatttggcaggggcagaaaactctggcaggcttaagatttggaataaagtcacagaattaaggaagcacctcaatttagttcaaacaagacgccaacattctctccacagctcacttacctctctgtgttcagatgtggccttccatttatatgtgatctttgttttattagtaaatgcttatcatctaaagatgtagctctggcccagtgggaaaaattaggaagtgattataaatcgagaggagttataataatcaagattaaatgtaaataatcagggcaatcccaacacatgtctagctttcacctccaggatctattgagtgaacagaattgcaaatagtctctatttgtaattgaacttatcctaaaacaaatagtttataaatgtgaacttaaactctaattaattccaactgtacttttaaggcagtggctgtttttagactttcttatcacttatagttagtaatgtacacctactctatcagagaaaaacaggaaaggctcgaaatacaagccattctaaggaaattagggagtcagttgaaattctattctgatcttattctgtggtgtcttttgcagcccagacaaatgtggttacacactttttaagaaatacaattctacattgtcaagcttatgaaggttccaatcagatctttattgttattcaatttggatctttcagggattttttttttaaattattatgggacaaaggacatttgttggaggggtgggagggaggaagaatttttaaatgtaaaacattcccaagtttggatcagggagttggaagttttcagaataaccagaactaagggtatgaaggacctgtattggggtcgatgtgatgcctctgcgaagaaccttgtgtgacaaatgagaaacattttgaagtttgtggtacgacctttagattccagagacatcagcatggctcaaagtgcagctccgtttggcagtgcaatggtataaatttcaagctggatatgtctaatgggtatttaaacaataaatgtgcagttttaactaacaggatatttaatgacaaccttctggttggtagggacatctgtttctaaatgtttattatgtacaatacagaaaaaaattttataaaattaagcaatgtgaaactgaattggagagtgataatacaagtcctttagtcttacccagtgaatcattctgttccatgtctttggacaaccatgaccttggacaatcatgaaatatgcatctcactggatgcaaagaaaatcagatggagcatgaatggtactgtaccggttcatctggactgccccagaaaaataacttcaagcaaacatcctatcaacaacaaggttgttctgcataccaagctgagcacagaagatgggaacactggtggaggatggaaaggctcgctcaatcaagaaaattctgagactattaataaataagactgtagtgtagatactgagtaaatccatgcacctaaaccttttggaaaatctgccgtgggccctccagatagctcatttcattaagtttttccctccaaggtagaatttgcaagagtgacagtggattgcatttcttttggggaagctttcttttggtggttttgtttattataccttcttaagttttcaaccaaggtttgcttttgttttgagttactggggttatttttgttttaaataaaaataagtgtacaataagtgtttttgtattgaaagcttttgttatcaagattttcatacttttaccttccatggctctttttaagattgatacttttaagaggtggctgatattctgcaacactgtacacataaaaaatacggtaaggatactttacatggttaaggtaaagtaagtctccagttggccaccattagctataatggcactttgtttgtgttgttggaaaaagtcacattgccattaaactttccttgtctgtctagttaatattgtgaagaaaaataaagtacagtgtgagatactg

SEQ ID NO: 11 - DNA, 2949 bp, Homo sapiens
  gene (1)..(2949): Accession No. NM_004333
cgcctcccttccccctccccgcccgacagcggccgctcgggccccggctctcggttataagatggcggcgctgagcggtggcggtggtggcggcgcggagccgggccaggctctgttcaacggggacatggagcccgaggccggcgccggcgccggcgccgcggcctcttcggctgcggaccctgccattccggaggaggtgtggaatatcaaacaaatgattaagttgacacaggaacatatagaggccctattggacaaatttggtggggagcataatccaccatcaatatatctggaggcctatgaagaatacaccagcaagctagatgcactccaacaaagagaacaacagttattggaatctctggggaacggaactgatttttctgtttctagctctgcatcaatggataccgttacatcttcttcctcttctagcctttcagtgctaccttcatctctttcagtttttcaaaatcccacagatgtggcacggagcaaccccaagtcaccacaaaaacctatcgttagagtcttcctgcccaacaaacagaggacagtggtacctgcaaggtgtggagttacagtccgagacagtctaaagaaagcactgatgatgagaggtctaatcccagagtgctgtgctgtttacagaattcaggatggagagaagaaaccaattggttgggacactgatatttcctggcttactggagaagaattgcatgtggaagtgttggagaatgttccacttacaacacacaactttgtacgaaaaacgtttttcaccttagcattttgtgacttttgtcgaaagctgcttttccagggtttccgctgtcaaacatgtggttataaatttcaccagcgttgtagtacagaagttccactgatgtgtgttaattatgaccaacttgatttgctgtttgtctccaagttctttgaacaccacccaataccacaggaagaggcgtccttagcagagactgccctaacatctggatcatccccttccgcacccgcctcggactctattgggccccaaattctcaccagtccgtctccttcaaaatccattccaattccacagcccttccgaccagcagatgaagatcatcgaaatcaatttgggcaacgagaccgatcctcatcagctcccaatgtgcatataaacacaatagaacctgtcaatattgatgacttgattagagaccaaggatttcgtggtgatggaggatcaaccacaggtttgtctgctaccccccctgcctcattacctggctcactaactaacgtgaaagccttacagaaatctccaggacctcagcgagaaaggaagtcatcttcatcctcagaagacaggaatcgaatgaaaacacttggtagacgggactcgagtgatgattgggagattcctgatgggcagattacagtgggacaaagaattggatctggatcatttggaacagtctacaagggaaagtggcatggtgatgtggcagtgaaaatgttgaatgtgacagcacctacacctcagcagttacaagccttcaaaaatgaagtaggagtactcaggaaaacacgacatgtgaatatcctactcttcatgggctattccacaaagccacaactggctattgttacccagtggtgtgagggctccagcttgtatcaccatctccatatcattgagaccaaatttgagatgatcaaacttatagatattgcacgacagactgcacagggcatggattacttacacgccaagtcaatcatccacagagacctcaagagtaataatatatttcttcatgaagacctcacagtaaaaataggtgattttggtctagctacagtgaaatctcgatggagtgggtcccatcagtttgaacagttgtctggatccattttgtggatggcaccagaagtcatcagaatgcaagataaaaatccatacagctttcagtcagatgtatatgcatttggaattgttctgtatgaattgatgactggacagttaccttattcaaacatcaacaacagggaccagataatttttatggtgggacgaggatacctgtctccagatctcagtaaggtacggagtaactgtccaaaagccatgaagagattaatggcagagtgcctcaaaaagaaaagagatgagagaccactctttccccaaattctcgcctctattgagctgctggcccgctcattgccaaaaattcaccgcagtgcatcagaaccctccttgaatcgggctggtttccaaacagaggattttagtctatatgcttgtgcttctccaaaaacacccatccaggcagggggatatggtgcgtttcctgtccactgaaacaaatgagtgagagagttcaggagagtagcaacaaaaggaaaataaatgaacatatgtttgcttatatgttaaattgaataaaatactctctttttttttaaggtgaaccaaagaacacttgtgtggttaaagactagatataatttttccccaaactaaaatttatacttaacattggatttttaacatccaagggttaaaatacatagacattgctaaaaattggcagagcctcttctagaggctttactttctgttccgggtttgtatcattcacttggttattttaagtagtaaacttcagtttctcatgcaacttttgttgccagctatcacatgtccactagggactccagaagaagaccctacctatgcctgtgtttgcaggtgagaagttggcagtcggttagcctgggttagataaggcaaactgaacagatctaatttaggaagtcagtagaatttaataattctattattattcttaataatttttctataactatttctttttataacaatttggaaaatgtggatgtcttttatttccttgaagcaataaactaagtttctttttataaaaa

SEQ ID NO: 12 - DNA, 1666 bp, Homo sapiens
  gene (1)..(1666): Accession No. NM_000067
cctccccttgtcgcctaggtccacccgagccccctcccccgggccgcccccgagcacgaagttggcgggagcctataaaagctggtgccggcgcgacccgcggacacacagtgcaggcgcccaagccgccgccgccagatcggtgccgattcctgccctgccccgaccgccagcgcgaccatgtcccatcactgggggtacggcaaacacaacggacctgagcactggcataaggacttccccattgccaagggagagcgccagtcccctgttgacatcgacactcatacagccaagtatgacccttccctgaagcccctgtctgtttcctatgatcaagcaacttccctgaggatcctcaacaatggtcatgctttcaacgtggagtttgatgactctcaggacaaagcagtgctcaagggaggacccctggatggcacttacagattgattcagtttcactttcactggggttcacttgatggacaaggttcagagcatactgtggataaaaagaaatatgctgcagaacttcacttggttcactggaacaccaaatatggggattttgggaaagctgtgcagcaacctgatggactggccgttctaggtatttttttgaaggttggcagcgctaaaccgggccttcagaaagttgttgatgtgctggattccattaaaacaaagggcaagagtgctgacttcactaacttcgatcctcgtggcctccttcctgaatccttggattactggacctacccaggctcactgaccacccctcctcttctggaatgtgtgacctggattgtgctcaaggaacccatcagcgtcagcagcgagcaggtgttgaaattccgtaaacttaacttcaatggggagggtgaacccgaagaactgatggtggacaactggcgcccagctcagccactgaagaacaggcaaatcaaagcttccttcaaataagatggtcccatagtctgtatccaaataatgaatcttcgggtgtttccctttagctaagcacagatctaccttggtgatttggaccctggttgctttgtgtctagttttctagacccttcatctcttacttgatagacttactaataaaatgtgaagactagaccaattgtcatgcttgacacaactgctgtggctggttggtgctttgtttatggtagtagtttttctgtaacacagaatataggataagaaataagaataaagtaccttgactttgttcacagcatgtagggtgatgagcactcacaattgttgactaaaatgctgcttttaaaacataggaaagtagaatggttgagtgcaaatccatagcacaagataaattgagctagttaaggcaaatcaggtaaaatagtcatgattctatgtaatgtaaaccagaaaaaataaatgttcatgatttcaagatgttatattaaagaaaaactttaaaaattattatatatttatagcaaagttatcttaaatatgaattctgttgtaatttaatgacttttgaattacagagatataaatgaagtattatctgtaaaaattgttataattagagttgtgatacagagtatatttccattcagacaatatatcataacttaataaatattgtattttagatatattctctaataaaattcagaattct

SEQ ID NO: 13 - DNA, 1165 bp, Homo sapiens
  gene (1)..(1165): Accession No. NM_000717
cgctataaaacccaggccggcaggatcgctgcacccgcggcggcctcctcggtgcgcgacccccggctcagaggactctttgctgtcccgcaagatgcggatgctgctggcgctcctggccctctccgcggcgcggccatcggccagtgcagagtcacactggtgctacgaggttcaagccgagtcctccaactacccctgcttggtgccagtcaagtggggtggaaactgccagaaggaccgccagtcccccatcaacatcgtcaccaccaaggcaaaggtggacaaaaaactgggacgcttcttcttctctggctacgataagaagcaaacgtggactgtccaaaataacgggcactcagtgatgatgttgctggagaacaaggccagcatttctggaggaggactgcctgccccataccaggccaaacagttgcacctgcactggtccgacttgccatataagggctcggagcacagcctcgatggggagcactttgccatggagatgcacatagtacatgagaaagagaaggggacatcgaggaatgtgaaagaggcccaggaccctgaagacgaaattgcggtgctggcctttctggtggaggctggaacccaggtgaacgagggcttccagccactggtggaggcactgtctaatatccccaaacctgagatgagcactacgatggcagagagcagcctgttggacctgctccccaaggaggagaaactgaggcactacttccgctacctgggctcactcaccacaccgacctgcgatgagaaggtcgtctggactgtgttccgggagcccattcagcttcacagagaacagatcctggcattctctcagaagctgtactacgacaaggaacagacagtgagcatgaaggacaatgtcaggcccctgcagcagctggggcagcgcacggtgataaagtccggggccccgggtcggccgctgccctgggccctgcctgccctgctgggccccatgctggcctgcctgctggccggcttcctgcgatgatggctcacttctgcacgcagcctctctgttgcctcagctctccaagttccaggcttccggtccttagccttcccaggtgggactttaggcatgattaaaatatggacatatttttggagaaaaaaaaaaaaa

SEQ ID NO: 14 - DNA, 1563 bp, Homo sapiens
  gene (1)..(1563): Accession No. NM_005182
ccgctgctttaagaggctgctccgcggtagcgagcggggccggagccgcagcccgaacgagcggaccgagccgaccgggcaggtgcacggctgcggggacggcagcggcatgaccggccaccacggctggggctacggccaggacgacggcccctcgcattggcacaagctgtatcccattgcccagggagatcgccaatcacccatcaatatcatctccagccaggctgtgtactctcccagcctgcaaccactggagctttcctatgaggcctgcatgtccctcagcatcaccaacaatggccactctgtccaggtagacttcaatgacagcgatgaccgaaccgtggtgactgggggccccctggaagggccctaccgcctcaagcagtttcacttccactggggcaagaagcacgatgtgggttctgagcacacggtggacggcaagtccttccccagcgagctgcatctggttcactggaatgccaagaagtacagcacttttggggaggcggcctcagcacctgatggcctggctgtggttggtgtttttttggagacaggagacgagcaccccagcatgaatcgtctgacagatgcgctctacatggtccggttcaagggcaccaaagcccagttcagctgcttcaaccccaagtgcctcctgcctgccagccggcactactggacctacccgggctctctgacgactcccccactcagtgagagtgtcacctggattgtgctccgggagcccatctgcatctctgaaaggcagatggggaagttccggagcctgctttttacctcggaggacgatgagaggatccacatggtgaacaacttccggccaccacagccactgaagggccgcgtggtaaaggcctccttccgggcctgagctgcccatctgcctagccggccactagggcaccatcttctcaagggcttccatgtcagcagacaccaaaccatctgaggcttcctccctggggggtgctggggaccctccttcagccagtttgctccttggtcaccctggaggcttctggatgggacccttgagtctggggcacccttcagctgccctggggacaggaaggacaggagctaagcagggtccaagcctggggctgcctctgctctccaagacccaaagaccctgggaacctcctctggtcttccccactggcagtggcagcagccccaccccgagcgcacactgtgatggaggagactgagctccctggggcgggcagctgacactaccagagagactcaagcaataattagaggtgggcagagctgccctctcggcattacctcttctgcaggctctgccatgcacgcacctcactgccaggccattaaaatcagcacccagcatgctggaggtgacgtggccttctccctccagccacctgctgccacgggcaggccctggctatagcttatacagtatctccccttgtccccacccagtcaccaaagccacctacatgacagtccatccctgttgaattaataaattaatgtatccatgcaacaaaaaaaaaaaaa

SEQ ID NO: 15 - DNA, 2095 bp, Homo sapiens
  gene (1)..(2095): Accession No. NM_001760
gcgcctgtcagggaagcggcgcgcgcgcgcgggcggcgggcgggctggggatccgccgcgcagtgccagcgccagcgccagacccgcgccccgcgctctccggcccgtcgcctgccttgggactcgcgagcccgcactcccgccctgcctgttcgctgcccgagtatggagctgctgtgttgcgaaggcacccggcacgcgccccgggccgggccggacccgcggctgctgggggaccagcgtgtcctgcagagcctgctccgcctggaggagcgctacgtaccccgcgcctcctacttccagtgcgtgcagcgggagatcaagccgcacatgcggaagatgctggcttactggatgctggaggtatgtgaggagcagcgctgtgaggaggaagtcttccccctggccatgaactacctggatcgctacctgtcttgcgtccccacccgaaaggcgcagttgcagctcctgggtgcggtctgcatgctgctggcctccaagctgcgcgagaccacgcccctgaccatcgaaaaactgtgcatctacaccgaccacgctgtctctccccgccagttgcgggactgggaggtgctggtcctagggaagctcaagtgggacctggctgctgtgattgcacatgatttcctggccttcattctgcaccggctctctctgccccgtgaccgacaggccttggtcaaaaagcatgcccagacctttttggccctctgtgctacagattatacctttgccatgtacccgccatccatgatcgccacgggcagcattggggctgcagtgcaaggcctgggtgcctgctccatgtccggggatgagctcacagagctgctggcagggatcactggcactgaagtggactgcctgcgggcctgtcaggagcagatcgaagctgcactcagggagagcctcagggaagcctctcagaccagctccagcccagcgcccaaagccccccggggctccagcagccaagggcccagccagaccagcactcctacagatgtcacagccatacacctgtagccctggagaggccctctggagtggccactaagcagaggaggggccgctgccacccacctccctgcctccaggaaccacaccacatctaagcctgaaggggcgtctgttcccccttcacaaagcccaagggatctggtcctacccatccccgcagtgtgcactaaggggcccggccagccatgtctgcatttcggtggctagtcaagctcctcctccctgcatctgaccagcagcgcctttcccaactctagctgggggtgggccaggctgatgggacagaattggatacatacaccagcattccttttgaacgcccccccccacccctgggggctctcatgttttcaactgccaaaatgctctagtgccttctaaaggtgttgtcccttctagggttattgcatttggattggggtccctctaaaatttaatgcatgatagacacatatgagggggaatagtctagatggctcctctcagtactttggaggcccctatgtagtccgtgctgacagctgctcctagagggaggggcctaggcctcagccagagaagctataaattcctctttgctttgctttctgctcagcttctcctgtgtgattgacagctttgctgctgaaggctcattttaatttattaattgctttgagcacaactttaagaggacataatggggtcctggccatcccacaagtggtggtaaccctggtggttgctgttttcctcccttctgctactggcaaaaggatctttgtggccaaggagctgctatagcctggggtggggtcatgccctcctctcccattgtccctctgccccatcctccagcagggaaaatgcagcagggatgccctggaggtggctgagcccctgtctagagagggaggcaagccctgttgacacaggtctttcctaaggctgcaaggtttaggctggtggcccaggaccatcatcctactgtaataaagatgattgtgaaataaaactggctttggcttcttggaaaaaaaaaaaaaaaaaaaaaaaaaaaaaaaaaaaaaaaaaaaaa

SEQ ID NO: 16 - DNA, 5748 bp, Homo sapiens
  gene (1)..(5748): Accession No. NM_000610
gagaagaaagccagtgcgtctctgggcgcaggggccagtggggctcggaggcacaggcaccccgcgacactccaggttccccgacccacgtccctggcagccccgattatttacagcctcagcagagcacggggcgggggcagaggggcccgcccgggagggctgctacttcttaaaacctctgcgggctgcttagtcacagccccccttgcttgggtgtgtccttcgctcgctccctccctccgtcttaggtcactgttttcaacctcgaataaaaactgcagccaacttccgaggcagcctcattgcccagcggaccccagcctctgccaggttcggtccgccatcctcgtcccgtcctccgccggcccctgccccgcgcccagggatcctccagctcctttcgcccgcgccctccgttcgctccggacaccatggacaagttttggtggcacgcagcctggggactctgcctcgtgccgctgagcctggcgcagatcgatttgaatataacctgccgctttgcaggtgtattccacgtggagaaaaatggtcgctacagcatctctcggacggaggccgctgacctctgcaaggctttcaatagcaccttgcccacaatggcccagatggagaaagctctgagcatcggatttgagacctgcaggtatgggttcatagaagggcacgtggtgattccccggatccaccccaactccatctgtgcagcaaacaacacaggggtgtacatcctcacatccaacacctcccagtatgacacatattgcttcaatgcttcagctccacctgaagaagattgtacatcagtcacagacctgcccaatgcctttgatggaccaattaccataactattgttaaccgtgatggcacccgctatgtccagaaaggagaatacagaacgaatcctgaagacatctaccccagcaaccctactgatgatgacgtgagcagcggctcctccagtgaaaggagcagcacttcaggaggttacatcttttacaccttttctactgtacaccccatcccagacgaagacagtccctggatcaccgacagcacagacagaatccctgctaccactttgatgagcactagtgctacagcaactgagacagcaaccaagaggcaagaaacctgggattggttttcatggttgtttctaccatcagagtcaaagaatcatcttcacacaacaacacaaatggctggtacgtcttcaaataccatctcagcaggctgggagccaaatgaagaaaatgaagatgaaagagacagacacctcagtttttctggatcaggcattgatgatgatgaagattttatctccagcaccatttcaaccacaccacgggcttttgaccacacaaaacagaaccaggactggacccagtggaacccaagccattcaaatccggaagtgctacttcagacaaccacaaggatgactgatgtagacagaaatggcaccactgcttatgaaggaaactggaacccagaagcacaccctcccctcattcaccatgagcatcatgaggaagaagagaccccacattctacaagcacaatccaggcaactcctagtagtacaacggaagaaacagctacccagaaggaacagtggtttggcaacagatggcatgagggatatcgccaaacacccaaagaagactcccattcgacaacagggacagctgcagcctcagctcataccagccatccaatgcaaggaaggacaacaccaagcccagaggacagttcctggactgatttcttcaacccaatctcacaccccatgggacgaggtcatcaagcaggaagaaggatggatatggactccagtcatagtataacgcttcagcctactgcaaatccaaacacaggtttggtggaagatttggacaggacaggacctctttcaatgacaacgcagcagagtaattctcagagcttctctacatcacatgaaggcttggaagaagataaagaccatccaacaacttctactctgacatcaagcaataggaatgatgtcacaggtggaagaagagacccaaatcattctgaaggctcaactactttactggaaggttatacctctcattacccacacacgaaggaaagcaggaccttcatcccagtgacctcagctaagactgggtcctttggagttactgcagttactgttggagattccaactctaatgtcaatcgttccttatcaggagaccaagacacattccaccccagtggggggtcccataccactcatggatctgaatcagatggacactcacatgggagtcaagaaggtggagcaaacacaacctctggtcctataaggacaccccaaattccagaatggctgatcatcttggcatccctcttggccttggctttgattcttgcagtttgcattgcagtcaacagtcgaagaaggtgtgggcagaagaaaaagctagtgatcaacagtggcaatggagctgtggaggacagaaagccaagtggactcaacggagaggccagcaagtctcaggaaatggtgcatttggtgaacaaggagtcgtcagaaactccagaccagtttatgacagctgatgagacaaggaacctgcagaatgtggacatgaagattggggtgtaacacctacaccattatcttggaaagaaacaaccgttggaaacataaccattacagggagctgggacacttaacagatgcaatgtgctactgattgtttcattgcgaatcttttttagcataaaattttctactctttttgttttttgtgttttgttctttaaagtcaggtccaatttgtaaaaacagcattgctttctgaaattagggcccaattaataatcagcaagaatttgatcgttccagttcccacttggaggcctttcatccctcgggtgtgctatggatggcttctaacaaaaactacacatatgtattcctgatcgccaacctttcccccaccagctaaggacatttcccagggttaatagggcctggtccctgggaggaaatttgaatgggtccattttgcccttccatagcctaatccctgggcattgctttccactgaggttgggggttggggtgtactagttacacatcttcaacagaccccctctagaaatttttcagatgcttctgggagacacccaaagggtgaagctatttatctgtagtaaactatttatctgtgtttttgaaatattaaaccctggatcagtcctttgatcagtataattttttaaagttactttgtcagaggcacaaaagggtttaaactgattcataataaatatctgtacttcttcgatcttcaccttttgtgctgtgattcttcagtttctaaaccagcactgtctgggtccctacaatgtatcaggaagagctgagaatggtaaggagactcttctaagtcttcatctcagagaccctgagttcccactcagacccactcagccaaatctcatggaagaccaaggagggcagcactgtttttgttttttgttttttgttttttttttttgacactgtccaaaggttttccatcctgtcctggaatcagagttggaagctgaggagcttcagcctcttttatggtttaatggccacctgttctctcctgtgaaaggctttgcaaagtcacattaagtttgcatgacctgttatccctggggccctatttcatagaggctggccctattagtgatttccaaaaacaatatggaagtgccttttgatgtcttacaataagagaagaagccaatggaaatgaaagagattggcaaaggggaaggatgatgccatgtagatcctgtttgacatttttatggctgtatttgtaaacttaaacacaccagtgtctgttcttgatgcagttgctatttaggatgagttaagtgcctggggagtccctcaaaaggttaaagggattcccatcattggaatcttatcaccagataggcaagtttatgaccaaacaagagagtactggctttatcctctaacctcatattttctcccacttggcaagtcctttgtggcatttattcatcagtcagggtgtccgattggtcctagaacttccaaaggctgcttgtcatagaagccattgcatctataaagcaacggctcctgttaaatggtatctcctttctgaggctcctactaaaagtcatttgttacctaaacttatgtgcttaacaggcaatgcttctcagaccacaaagcagaaagaagaagaaaagctcctgactaaatcagggctgggcttagacagagttgatctgtagaatatctttaaaggagagatgtcaactttctgcactattcccagcctctgctcctccctgtctaccctctcccctccctctctccctccacttcaccccacaatcttgaaaaacttcctttctcttctgtgaacatcattggccagatccattttcagtggtctggatttctttttattttcttttcaacttgaaagaaactggacattaggccactatgtgttgttactgccactagtgttcaagtgcctcttgttttcccagagatttcctgggtctgccagaggcccagacaggctcactcaagctctttaactgaaaagcaacaagccactccaggacaaggttcaaaatggttacaacagcctctacctgtcgccccagggagaaaggggtagtgatacaagtctcatagccagagatggttttccactccttctagatattcccaaaaagaggctgagacaggaggttattttcaattttattttggaattaaatacttttttccctttattactgttgtagtccctcacttggatatacctctgttttcacgatagaaataagggaggtctagagcttctattccttggccattgtcaacggagagctggccaagtcttcacaaacccttgcaacattgcctgaagtttatggaataagatgtattctcactcccttgatctcaagggcgtaactctggaagcacagcttgactacacgtcatttttaccaatgattttcaggtgacctgggctaagtcatttaaactgggtctttataaaagtaaaaggccaacatttaattattttgcaaagcaacctaagagctaaagatgtaatttttcttgcaattgtaaatcttttgtgtctcctgaagacttcccttaaaattagctctgagtgaaaaatcaaaagagacaaaagacatcttcgaatccatatttcaagcctggtagaattggcttttctagcagaacctttccaaaagttttatattgagattcataacaacaccaagaattgattttgtagccaacattcattcaatactgttatatcagaggagtaggagagaggaaacatttgacttatctggaaaagcaaaatgtacttaagaataagaataacatggtccattcacctttatgttatagatatgtctttgtgtaaatcatttgttttgagttttcaaagaatagcccattgttcattcttgtgctgtacaatgaccactgttattgttactttgacttttcagagcacacccttcctctggtttttgtatatttattgatggatcaataataatgaggaaagcatgatatgtatattgctgagttgaaagcacttattggaaaatattaaaaggctaacattaaaagactaaaggaaacagaaaaaaaaaaaaaaaaa

SEQ ID NO: 17 - DNA, 1031 bp, Homo sapiens
  gene (1)..(1031): Accession No. NM_001780
cagctgttaccgcgtcacatgagggaggccggcggccactcggcgggggaggggaccgtggctggagcccggggcggggccgcgcggcaggcggggcgggagccggggggcgcagctagagagccccggagccgcggcgggagaggaacgcgcagccagccttgggaagcccaggcccggcagccatggcggtggaaggaggaatgaaatgtgtgaagttcttgctctacgtcctcctgctggccttttgcgcctgtgcagtgggactgattgccgtgggtgtcggggcacagcttgtcctgagtcagaccataatccagggggctacccctggctctctgttgccagtggtcatcatcgcagtgggtgtcttcctcttcctggtggcttttgtgggctgctgcggggcctgcaaggagaactattgtcttatgatcacgtttgccatctttctgtctcttatcatgttggtggaggtggccgcagccattgctggctatgtgtttagagataaggtgatgtcagagtttaataacaacttccggcagcagatggagaattacccgaaaaacaaccacactgcttcgatcctggacaggatgcaggcagattttaagtgctgtggggctgctaactacacagattgggagaaaatcccttccatgtcgaagaaccgagtccccgactcctgctgcattaatgttactgtgggctgtgggattaatttcaacgagaaggcgatccataaggagggctgtgtggagaagattgggggctggctgaggaaaaatgtgctggtggtagctgcagcagcccttggaattgcttttgtcgaggttttgggaattgtctttgcctgctgcctcgtgaagagtatcagaagtggctacgaggtgatgtaggggtctggtctcctcagcctcctcatctgggggagtggaatagtatcctccaggtttttcaattaaacggattattttttcagaccgaaaagagatggtctgagtttgtcttagaaaaaaaaaaaaaaa

SEQ ID NO: 18 - DNA, 1923 bp, Homo sapiens
  gene (1)..(1923): Accession No. NM_001786
agcgcggtgagtttgaaactgctcgcacttggcttcaaagctggctcttggaaattgagcggagagcgacgcggttgttgtagctgccgctgcggccgccgcggaataataagccgggatctaccatacccattgactaactatggaagattataccaaaatagagaaaattggagaaggtacctatggagttgtgtataagggtagacacaaaactacaggtcaagtggtagccatgaaaaaaatcagactagaaagtgaagaggaaggggttcctagtactgcaattcgggaaatttctctattaaaggaacttcgtcatccaaatatagtcagtcttcaggatgtgcttatgcaggattccaggttatatctcatctttgagtttctttccatggatctgaagaaatacttggattctatccctcctggtcagtacatggattcttcacttgttaagagttatttataccaaatcctacaggggattgtgttttgtcactctagaagagttcttcacagagacttaaaacctcaaaatctcttgattgatgacaaaggaacaattaaactggctgattttggccttgccagagcttttggaatacctatcagagtatatacacatgaggtagtaacactctggtacagatctccagaagtattgctggggtcagctcgttactcaactccagttgacatttggagtataggcaccatatttgctgaactagcaactaagaaaccacttttccatggggattcagaaattgatcaactcttcaggattttcagagctttgggcactcccaataatgaagtgtggccagaagtggaatctttacaggactataagaatacatttcccaaatggaaaccaggaagcctagcatcccatgtcaaaaacttggatgaaaatggcttggatttgctctcgaaaatgttaatctatgatccagccaaacgaatttctggcaaaatggcactgaatcatccatattttaatgatttggacaatcagattaagaagatgtagctttctgacaaaaagtttccatatgttatatcaacagatagttgtgtttttattgttaactcttgtctatttttgtcttatatatatttctttgttatcaaacttcagctgtacttcgtcttctaatttcaaaaatataacttaaaaatgtaaatattctatatgaatttaaatataattctgtaaatgtgtgtaggtctcactgtaacaactatttgttactataataaaactataatattgatgtcaggaatcaggaaaaaatttgagttggcttaaatcatctcagtccttatggcagttttattttcctgtagttggaactactaaaatttaggaaaatgctaagttcaagtttcgtaatgctttgaagtatttttatgctctgaatgtttaaatgttctcatcagtttcttgccatgttgttaactatacaacctggctaaagatgaatatttttctactggtattttaatttttgacctaaatgtttaagcattcggaatgagaaaactatacagatttgagaaatgatgctaaatttataggagttttcagtaacttaaaaagctaacatgagagcatgccaaaatttgctaagtcttacaaagatcaagggctgtccgcaacagggaagaacagttttgaaaatttatgaactatcttatttttaggtaggttttgaaagctttttgtctaagtgaattcttatgccttggtcagagtaataactgaaggagttgcttatcttggctttcgagtctgagtttaaaactacacattttgacatagtgtttattagcagccatctaaaaaggctctaatgtatatttaactaaaattactagctttgggaattaaactgtttaacaaataaaaaaaaaaaa

SEQ ID NO: 19 - DNA, 2090 bp, Homo sapiens
  gene (1)..(2090): Accession No. NM_001265
gggaccgcctcggaggcagaagagccgcgaggagccagcggagcaccgcgggctggggcgcagccacccgccgctcctcgagtcccctcgcccctttcccttcgtgccccccggcagcctccagcgtcggtccccaggcagcatggtgaggtctgctcccggaccctcgccaccatgtacgtgagctacctcctggacaaggacgtgagcatgtaccctagctccgtgcgccactctggcggcctcaacctggcgccgcagaacttcgtcagccccccgcagtacccggactacggcggttaccacgtggcggccgcagctgcagcggcagcgaacttggacagcgcgcagtccccggggccatcctggccggcagcgtatggcgccccactccgggaggactggaatggctacgcgcccggaggcgccgcggccgccgccaacgccgtggctcacggcctcaacggtggctccccggccgcagccatgggctacagcagccccgcagactaccatccgcaccaccacccgcatcaccacccgcaccacccggccgccgcgccttcctgcgcttctgggctgctgcaaacgctcaaccccggccctcctgggcccgccgccaccgctgccgccgagcagctgtctcccggcggccagcggcggaacctgtgcgagtggatgcggaagccggcgcagcagtccctcggcagccaagtgaaaaccaggacgaaagacaaatatcgagtggtgtacacggaccaccagcggctggagctggagaaggagtttcactacagtcgctacatcaccatccggaggaaagccgagctagccgccacgctggggctctctgagaggcaggttaaaatctggtttcagaaccgcagagcaaaggagaggaaaatcaacaagaagaagttgcagcagcaacagcagcagcagccaccacagccgcctccgccgccaccacagcctccccagcctcagccaggtcctctgagaagtgtcccagagcccttgagtccggtgtcttccctgcaagcctcagtgcctggctctgtccctggggttctggggccaactgggggggtgctaaaccccaccgtcacccagtgacccaccgggttctgcagcggcagagcaattccaggctgagccatgaggagcgtggactctgctagactcctcaggagagacccctcccctcccacccacagccatagacctacagacctggctctcagaggaaaaatgggagccaggagtaagacaagtgggatttggggcctcaagaaatatactctcccagatttttactttttcccatctggctttttctgccactgaggagacagaaagcctccgctgggcttcattccggactggcagaagcattgcctggactgaccacaccaaccaggccttcatcctcctccccagctcttctcttcctagatctgcaggctgcacctctggctagagccgaggggagagagggactcaagggaaaggcaagcttgaggccaagatggctgctgcctgctcatggccctcggaggtccagctgggcctcctgcctccgggcaggcaaggtttacactgcggaagccaaaggcagctaagatagaaagctggactgaccaaagactgcagaacccccaggtggcctgcgtcttttttctcttcccttcccagaccaggaaaggcttggctggtgtatgcacagggtgtggtatgagggggtggttattggactccaggcctgaccagggggcccgaacagggacttgtttagagagcctgtcaccagagcttctctgggctgaatgtatgtcagtgctataaatgccagagccaacctggacttcctgtcattttcacaatcttggggctgatgaagaagggggtggggggagtttgtgttgttgttgctgctgtttgggttgttggtctgtgtaacatccaagccagagtttttaaagccttctggatccatggggggagaagtgatatggtgaagggaagtggggagtatttgaacacagttgaattttttctaaaaagaaaaagagataaatgagctttccaga

SEQ ID NO: 20 - DNA, 1173 bp, Homo sapiens
  gene (1)..(1173): Accession No. NM_001928
gtgtctcagccacagcggcttcaccatgcacagctgggagcgcctggcagttctggtcctcctaggagcggccgcctgcgcggcgccgccccgtggtcggatcctgggcggcagagaggccgaggcgcacgcgcggccctacatggcgtcggtgcagctgaacggcgcgcacctgtgcggcggcgtcctggtggcggagcagtgggtgctgagcgcggcgcactgcctggaggacgcggccgacgggaaggtgcaggttctcctgggcgcgcactccctgtcgcagccggagccctccaagcgcctgtacgacgtgctccgcgcagtgccccacccggacagccagcccgacaccatcgaccacgacctcctgctgctacagctgtcggagaaggccacactgggccctgctgtgcgccccctgccctggcagcgcgtggaccgcgacgtggcaccgggaactctctgcgacgtggccggctggggcatagtcaaccacgcgggccgccgcccggacagcctgcagcacgtgctcttgccagtgctggaccgcgccacctgcaaccggcgcacgcaccacgacggcgccatcaccgagcgcttgatgtgcgcggagagcaatcgccgggacagctgcaagggtgactccgggggcccgctggtgtgcgggggcgtgctcgagggcgtggtcacctcgggctcgcgcgtttgcggcaaccgcaagaagcccgggatctacacccgcgtggcgagctatgcggcctggatcgacagcgtcctggcctagggtgccggggcctgaaggtcagggtcacccaagcaacaaagtcccgagcaatgaagtcatccactcctgcatctggttggtctttattgagcacctactatatgcagaaggggaggccgaggtgggaggatcattggatctcaggagttcgagatcagcatgggccacgtagcgcgactccatctctacaaataaataaaaaattagctgggcaattggcgggcatggaggtgggtgcttgtagttccagctactcaggaggctgaggtgggaggatgacttgaacgcaggaggctgaggctgcagtgagttgtgattgcaccactgccctccagcctgggcaacagagtgaaaccttgtctctctctacaaaaaaaaaaaaaaaa

SEQ ID NO: 21 - DNA, 2215 bp, Homo sapiens
  gene (1)..(2215): Accession No. NM_003879
caagccatagcaggaaacagcgagcttgcagcctcaccgacgagtctcaactaaaagggactcccggagctaggggtggggactcggcctcacacagtgagtgccggctattggacttttgtccagtgacagctgagacaacaaggaccacgggaggaggtgtaggagagaagcgccgcgaacagcgatcgcccagcaccaagtccgcttccaggctttcggtttctttgcctccatcttgggtgcgccttcccggcgtctaggggagcgaaggctgaggtggcagcggcaggagagtccggccgcgacaggacgaactcccccactggaaaggattctgaaagaaatgaagtcagccctcagaaatgaagttgactgcctgctggctttctgttgactggcccggagctgtactgcaagacccttgtgagcttccctagtctaagagtaggatgtctgctgaagtcatccatcaggttgaagaagcacttgatacagatgagaaggagatgctgctctttttgtgccgggatgttgctatagatgtggttccacctaatgtcagggaccttctggatattttacgggaaagaggtaagctgtctgtcggggacttggctgaactgctctacagagtgaggcgatttgacctgctcaaacgtatcttgaagatggacagaaaagctgtggagacccacctgctcaggaaccctcaccttgtttcggactatagagtgctgatggcagagattggtgaggatttggataaatctgatgtgtcctcattaattttcctcatgaaggattacatgggccgaggcaagataagcaaggagaagagtttcttggaccttgtggttgagttggagaaactaaatctggttgccccagatcaactggatttattagaaaaatgcctaaagaacatccacagaatagacctgaagacaaaaatccagaagtacaagcagtctgttcaaggagcagggacaagttacaggaatgttctccaagcagcaatccaaaagagtctcaaggatccttcaaataacttcaggctccataatgggagaagtaaagaacaaagacttaaggaacagcttggcgctcaacaagaaccagtgaagaaatccattcaggaatcagaagcttttttgcctcagagcatacctgaagagagatacaagatgaagagcaagcccctaggaatctgcctgataatcgattgcattggcaatgagacagagcttcttcgagacaccttcacttccctgggctatgaagtccagaaattcttgcatctcagtatgcatggtatatcccagattcttggccaatttgcctgtatgcccgagcaccgagactacgacagctttgtgtgtgtcctggtgagccgaggaggctcccagagtgtgtatggtgtggatcagactcactcagggctccccctgcatcacatcaggaggatgttcatgggagattcatgcccttatctagcagggaagccaaagatgttttttattcagaactatgtggtgtcagagggccagctggaggacagcagcctcttggaggtggatgggccagcgatgaagaatgtggaattcaaggctcagaagcgagggctgtgcacagttcaccgagaagctgacttcttctggagcctgtgtactgcggacatgtccctgctggagcagtctcacagctcaccatccctgtacctgcagtgcctctcccagaaactgagacaagaaagaaaacgcccactcctggatcttcacattgaactcaatggctacatgtatgattggaacagcagagtttctgccaaggagaaatattatgtctggctgcagcacactctgagaaagaaacttatcctctcctacacataagaaaccaaaaggctgggcgtagtggctcacacctgtaatcccagcactttgggaggccaaggagggcagatcacttcaggtcaggagttcgagaccagcctggccaacatggtaaacgctgtccctagtaaaaatacaaaaattagctgggtgtgggtgtgggtacctgtattcccagttacttgggaggctgaggtgggaggatcttttgaacccaggagttcagggtcatagcatgctgtgattgtgcctacgaatagccactgcataccaacctgggcaatatagcaagatcccatctctttaaaaaaaaaaaaaaa

SEQ ID NO: 22 - DNA, 3445 bp, Homo sapiens
  gene (1)..(3445): Accession No. NM_021101
gagcaaccgcagcttctagtatccagactccagcgccgccccgggcgcggaccccaaccccgacccagagcttctccagcggcggcgcagcgagcagggctccccgccttaacttcctccgcggggcccagccaccttcgggagtccgggttgcccacctgcaaactctccgccttctgcacctgccacccctgagccagcgcgggcgcccgagcgagtcatggccaacgcggggctgcagctgttgggcttcattctcgccttcctgggatggatcggcgccatcgtcagcactgccctgccccagtggaggatttactcctatgccggcgacaacatcgtgaccgcccaggccatgtacgaggggctgtggatgtcctgcgtgtcgcagagcaccgggcagatccagtgcaaagtctttgactccttgctgaatctgagcagcacattgcaagcaacccgtgccttgatggtggttggcatcctcctgggagtgatagcaatctttgtggccaccgttggcatgaagtgtatgaagtgcttggaagacgatgaggtgcagaagatgaggatggctgtcattgggggtgcgatatttcttcttgcaggtctggctattttagttgccacagcatggtatggcaatagaatcgttcaagaattctatgaccctatgaccccagtcaatgccaggtacgaatttggtcaggctctcttcactggctgggctgctgcttctctctgccttctgggaggtgccctactttgctgttcctgtccccgaaaaacaacctcttacccaacaccaaggccctatccaaaacctgcaccttccagcgggaaagactacgtgtgacacagaggcaaaaggagaaaatcatgttgaaacaaaccgaaaatggacattgagatactatcattaacattaggaccttagaattttgggtattgtaatctgaagtatggtattacaaaacaaacaaacaaacaaaaaacccatgtgttaaaatactcagtgctaaacatggcttaatcttattttatcttctttcctcaatataggagggaagatttttccatttgtattactgcttcccattgagtaatcatactcaattgggggaaggggtgctccttaaatatatatagatatgtatatatacatgtttttctattaaaaatagacagtaaaatactattctcattatgttgatactagcatacttaaaatatctctaaaataggtaaatgtatttaattccatattgatgaagatgtttattggtatattttctttttcgtctatatatacatatgtaacagtcaaatatcatttactcttcttcattagctttgggtgcctttgccacaagacctagcctaatttaccaaggatgaattctttcaattcttcatgcgtgcccttttcatatacttattttattttttaccataatcttatagcacttgcatcgttattaagcccttatttgttttgtgtttcattggtctctatctcctgaatctaacacatttcatagcctacattttagtttctaaagccaagaagaatttattacaaatcagaactttggaggcaaatctttctgcatgaccaaagtgataaattcctgttgaccttcccacacaatccctgtactctgacccatagcactcttgtttgctttgaaaatatttgtccaattgagtagctgcatgctgttcccccaggtgttgtaacacaactttattgattgaatttttaagctacttattcatagttttatatccccctaaactacctttttgttccccattccttaattgtattgttttcccaagtgtaattatcatgcgttttatatcttcctaataaggtgtggtctgtttgtctgaacaaagtgctagactttctggagtgataatctggtgacaaatattctctctgtagctgtaagcaagtcacttaatctttctacctcttttttctatctgccaaattgagataatgatacttaaccagttagaagaggtagtgtgaatattaattagtttatattactctcattctttgaacatgaactatgcctatgtagtgtctttatttgctcagctggctgagacactgaagaagtcactgaacaaaacctacacacgtaccttcatgtgattcactgccttcctctctctaccagtctatttccactgaacaaaacctacacacataccttcatgtggttcagtgccttcctctctctaccagtctatttccactgaacaaaacctacgcacataccttcatgtggctcagtgccttcctctctctaccagtctatttccattctttcagctgtgtctgacatgtttgtgctctgttccattttaacaactgctcttacttttccagtctgtacagaatgctatttcacttgagcaagatgatgtaatggaaagggtgttggcattggtgtctggagacctggatttgagtcttggtgctatcaatcaccgtctgtgtttgagcaaggcatttggctgctgtaagcttattgcttcatctgtaagcggtggtttgtaattcctgatcttcccacctcacagtgatgttgtggggatccagtgagatagaatacatgtaagtgtggttttgtaatttaaaaagtgctatactaagggaaagaattgaggaattaactgcatacgttttggtgttgcttttcaaatgtttgaaaacaaaaaaaatgttaagaaatgggtttcttgccttaaccagtctctcaagtgatgagacagtgaagtaaaattgagtgcactaaacaaataagattctgaggaagtcttatcttctgcagtgagtatggcccgatgctttctgtggctaaacagatgtaatgggaagaaataaaagcctacgtgttggtaaatccaacagcaagggagatttttgaatcataataactcataaggtgctatctgttcagtgatgccctcagagctcttgctgttagctggcagctgacgctgctaggatagttagtttggaaatggtacttcataataaactacacaaggaaagtcagccactgtgtcttatgaggaattggacctaataaattttagtgtgccttccaaacctgagaatatatgcttttggaagttaaaatttaaatggcttttgccacatacatagatcttcatgatgtgtgagtgtaattccatgtggatatcagttaccaaacattacaaaaaaattttatggcccaaaatgaccaacgaaattgttacaatagaatttatccaattttgatctttttatattcttctaccacacctggaaacagaccaatagacattttggggttttataataggaatttgtataaagcattactctttttcaataaattgttttttaatttaaaaaaaggaaaaaaaaaaaaaaaaa

SEQ ID NO: 23 - DNA, 1103 bp, Homo sapiens
  gene (1)..(1103): Accession No. NM_001511
cacagagcccgggccgcaggcacctcctcgccagctcttccgctcctctcacagccgccagacccgcctgctgagccccatggcccgcgctgctctctccgccgcccccagcaatccccggctcctgcgagtggcactgctgctcctgctcctggtagccgctggccggcgcgcagcaggagcgtccgtggccactgaactgcgctgccagtgcttgcagaccctgcagggaattcaccccaagaacatccaaagtgtgaacgtgaagtcccccggaccccactgcgcccaaaccgaagtcatagccacactcaagaatgggcggaaagcttgcctcaatcctgcatcccccatagttaagaaaatcatcgaaaagatgctgaacagtgacaaatccaactgaccagaagggaggaggaagctcactggtggctgttcctgaaggaggccctgcccttataggaacagaagaggaaagagagacacagctgcagaggccacctggattgtgcctaatgtgtttgagcatcgcttaggagaagtcttctatttatttatttattcattagttttgaagattctatgttaatattttaggtgtaaaataattaagggtatgattaactctacctgcacactgtcctattatattcattctttttgaaatgtcaaccccaagttagttcaatctggattcatatttaatttgaaggtagaatgttttcaaatgttctccagtcattatgttaatatttctgaggagcctgcaacatgccagccactgtgatagaggctggcggatccaagcaaatggccaatgagatcattgtgaaggcaggggaatgtatgtgcacatctgttttgtaactgtttagatgaatgtcagttgttatttattgaaatgatttcacagtgtgtggtcaacatttctcatgttgaaactttaagaactaaaatgttctaaatatcccttggacattttatgtctttcttgtaaggcatactgccttgtttaatggtagttttacagtgtttctggcttagaacaaaggggcttaattattgatgttttcatagagaatataaaaataaagcacttatag

SEQ ID NO: 24 - DNA, 475 bp, Homo sapiens
  gene (1)..(475): Accession No. NM_001926
acacatctgctcctgctctctctcctccagcgaccctagccatgagaaccctcaccatcctcactgctgttctcctcgtggccctccaggccaaggctgagccactccaagctgaggatgatccactgcaggcaaaagcttatgaggctgatgcccaggagcagcgtggggcaaatgaccaggactttgccgtctcctttgcagaggatgcaagctcaagtcttagagctttgggctcaacaagggctttcacttgccattgcagaaggtcctgttattcaacagaatattcctatgggacctgcactgtcatgggtattaaccacagattctgctgcctctgagggatgagaacagagagaaatatattcataatttactttatgacctagaaggaaactgtcgtgtgtcccatacattgccatcaactttgtttcctcatctcaaataaagtcctttcagcaaaaaaaaaaaa

SEQ ID NO: 25 - DNA, 4624 bp, Homo sapiens
  gene (1)..(4624): Accession No. NM_004448
ggaggaggtggaggaggagggctgcttgaggaagtataagaatgaagttgtgaagctgagattcccctccattgggaccggagaaaccaggggagccccccgggcagccgcgcgccccttcccacggggccctttactgcgccgcgcgcccggcccccacccctcgcagcaccccgcgccccgcgccctcccagccgggtccagccggagccatggggccggagccgcagtgagcaccatggagctggcggccttgtgccgctgggggctcctcctcgccctcttgccccccggagccgcgagcacccaagtgtgcaccggcacagacatgaagctgcggctccctgccagtcccgagacccacctggacatgctccgccacctctaccagggctgccaggtggtgcagggaaacctggaactcacctacctgcccaccaatgccagcctgtccttcctgcaggatatccaggaggtgcagggctacgtgctcatcgctcacaaccaagtgaggcaggtcccactgcagaggctgcggattgtgcgaggcacccagctctttgaggacaactatgccctggccgtgctagacaatggagacccgctgaacaataccacccctgtcacaggggcctccccaggaggcctgcgggagctgcagcttcgaagcctcacagagatcttgaaaggaggggtcttgatccagcggaacccccagctctgctaccaggacacgattttgtggaaggacatcttccacaagaacaaccagctggctctcacactgatagacaccaaccgctctcgggcctgccacccctgttctccgatgtgtaagggctcccgctgctggggagagagttctgaggattgtcagagcctgacgcgcactgtctgtgccggtggctgtgcccgctgcaaggggccactgcccactgactgctgccatgagcagtgtgctgccggctgcacgggccccaagcactctgactgcctggcctgcctccacttcaaccacagtggcatctgtgagctgcactgcccagccctggtcacctacaacacagacacgtttgagtccatgcccaatcccgagggccggtatacattcggcgccagctgtgtgactgcctgtccctacaactacctttctacggacgtgggatcctgcaccctcgtctgccccctgcacaaccaagaggtgacagcagaggatggaacacagcggtgtgagaagtgcagcaagccctgtgcccgagtgtgctatggtctgggcatggagcacttgcgagaggtgagggcagttaccagtgccaatatccaggagtttgctggctgcaagaagatctttgggagcctggcatttctgccggagagctttgatggggacccagcctccaacactgccccgctccagccagagcagctccaagtgtttgagactctggaagagatcacaggttacctatacatctcagcatggccggacagcctgcctgacctcagcgtcttccagaacctgcaagtaatccggggacgaattctgcacaatggcgcctactcgctgaccctgcaagggctgggcatcagctggctggggctgcgctcactgagggaactgggcagtggactggccctcatccaccataacacccacctctgcttcgtgcacacggtgccctgggaccagctctttcggaacccgcaccaagctctgctccacactgccaaccggccagaggacgagtgtgtgggcgagggcctggcctgccaccagctgtgcgcccgagggcactgctggggtccagggcccacccagtgtgtcaactgcagccagttccttcggggccaggagtgcgtggaggaatgccgagtactgcaggggctccccagggagtatgtgaatgccaggcactgtttgccgtgccaccctgagtgtcagccccagaatggctcagtgacctgttttggaccggaggctgaccagtgtgtggcctgtgcccactataaggaccctcccttctgcgtggcccgctgccccagcggtgtgaaacctgacctctcctacatgcccatctggaagtttccagatgaggagggcgcatgccagccttgccccatcaactgcacccactcctgtgtggacctggatgacaagggctgccccgccgagcagagagccagccctctgacgtccatcatctctgcggtggttggcattctgctggtcgtggtcttgggggtggtctttgggatcctcatcaagcgacggcagcagaagatccggaagtacacgatgcggagactgctgcaggaaacggagctggtggagccgctgacacctagcggagcgatgcccaaccaggcgcagatgcggatcctgaaagagacggagctgaggaaggtgaaggtgcttggatctggcgcttttggcacagtctacaagggcatctggatccctgatggggagaatgtgaaaattccagtggccatcaaagtgttgagggaaaacacatcccccaaagccaacaaagaaatcttagacgaagcatacgtgatggctggtgtgggctccccatatgtctcccgccttctgggcatctgcctgacatccacggtgcagctggtgacacagcttatgccctatggctgcctcttagaccatgtccgggaaaaccgcggacgcctgggctcccaggacctgctgaactggtgtatgcagattgccaaggggatgagctacctggaggatgtgcggctcgtacacagggacttggccgctcggaacgtgctggtcaagagtcccaaccatgtcaaaattacagacttcgggctggctcggctgctggacattgacgagacagagtaccatgcagatgggggcaaggtgcccatcaagtggatggcgctggagtccattctccgccggcggttcacccaccagagtgatgtgtggagttatggtgtgactgtgtgggagctgatgacttttggggccaaaccttacgatgggatcccagcccgggagatccctgacctgctggaaaagggggagcggctgccccagccccccatctgcaccattgatgtctacatgatcatggtcaaatgttggatgattgactctgaatgtcggccaagattccgggagttggtgtctgaattctcccgcatggccagggacccccagcgctttgtggtcatccagaatgaggacttgggcccagccagtcccttggacagcaccttctaccgctcactgctggaggacgatgacatgggggacctggtggatgctgaggagtatctggtaccccagcagggcttcttctgtccagaccctgccccgggcgctgggggcatggtccaccacaggcaccgcagctcatctaccaggagtggcggtggggacctgacactagggctggagccctctgaagaggaggcccccaggtctccactggcaccctccgaaggggctggctccgatgtatttgatggtgacctgggaatgggggcagccaaggggctgcaaagcctccccacacatgaccccagccctctacagcggtacagtgaggaccccacagtacccctgccctctgagactgatggctacgttgcccccctgacctgcagcccccagcctgaatatgtgaaccagccagatgttcggccccagcccccttcgccccgagagggccctctgcctgctgcccgacctgctggtgccactctggaaaggcccaagactctctccccagggaagaatggggtcgtcaaagacgtttttgcctttgggggtgccgtggagaaccccgagtacttgacaccccagggaggagctgcccctcagccccaccctcctcctgccttcagcccagccttcgacaacctctattactgggaccaggacccaccagagcggggggctccacccagcaccttcaaagggacacctacggcagagaacccagagtacctgggtctggacgtgccagtgtgaaccagaaggccaagtccgcagaagccctgatgtgtcctcagggagcagggaaggcctgacttctgctggcatcaagaggtgggagggccctccgaccacttccaggggaacctgccatgccaggaacctgtcctaaggaaccttccttcctgcttgagttcccagatggctggaaggggtccagcctcgttggaagaggaacagcactggggagtctttgtggattctgaggccctgcccaatgagactctagggtccagtggatgccacagcccagcttggccctttccttccagatcctgggtactgaaagccttagggaagctggcctgagaggggaagcggccctaagggagtgtctaagaacaaaagcgacccattcagagactgtccctgaaacctagtactgccccccatgaggaaggaacagcaatggtgtcagtatccaggctttgtacagagtgcttttctgtttagtttttactttttttgttttgtttttttaaagatgaaataaagacccagggggagaatgggtgttgtatggggaggcaagtgtggggggtccttctccacacccactttgtccatttgcaaatatattttggaaaacagcta

SEQ ID NO: 26 - DNA, 5511 bp, Homo sapiens
  gene (1)..(5511): Accession No. NM_001982
acacacacacacccctcccctgccatccctccccggactccggctccggctccgattgcaatttgcaacctccgctgccgtcgccgcagcagccaccaattcgccagcggttcaggtggctcttgcctcgatgtcctagcctaggggcccccgggccggacttggctgggctcccttcaccctctgcggagtcatgagggcgaacgacgctctgcaggtgctgggcttgcttttcagcctggcccggggctccgaggtgggcaactctcaggcagtgtgtcctgggactctgaatggcctgagtgtgaccggcgatgctgagaaccaataccagacactgtacaagctctacgagaggtgtgaggtggtgatggggaaccttgagattgtgctcacgggacacaatgccgacctctccttcctgcagtggattcgagaagtgacaggctatgtcctcgtggccatgaatgaattctctactctaccattgcccaacctccgcgtggtgcgagggacccaggtctacgatgggaagtttgccatcttcgtcatgttgaactataacaccaactccagccacgctctgcgccagctccgcttgactcagctcaccgagattctgtcagggggtgtttatattgagaagaacgataagctttgtcacatggacacaattgactggagggacatcgtgagggaccgagatgctgagatagtggtgaaggacaatggcagaagctgtcccccctgtcatgaggtttgcaaggggcgatgctggggtcctggatcagaagactgccagacattgaccaagaccatctgtgctcctcagtgtaatggtcactgctttgggcccaaccccaaccagtgctgccatgatgagtgtgccgggggctgctcaggccctcaggacacagactgctttgcctgccggcacttcaatgacagtggagcctgtgtacctcgctgtccacagcctcttgtctacaacaagctaactttccagctggaacccaatccccacaccaagtatcagtatggaggagtttgtgtagccagctgtccccataactttgtggtggatcaaacatcctgtgtcagggcctgtcctcctgacaagatggaagtagataaaaatgggctcaagatgtgtgagccttgtgggggactatgtcccaaagcctgtgagggaacaggctctgggagccgcttccagactgtggactcgagcaacattgatggatttgtgaactgcaccaagatcctgggcaacctggactttctgatcaccggcctcaatggagacccctggcacaagatccctgccctggacccagagaagctcaatgtcttccggacagtacgggagatcacaggttacctgaacatccagtcctggccgccccacatgcacaacttcagtgttttttccaatttgacaaccattggaggcagaagcctctacaaccggggcttctcattgttgatcatgaagaacttgaatgtcacatctctgggcttccgatccctgaaggaaattagtgctgggcgtatctatataagtgccaataggcagctctgctaccaccactctttgaactggaccaaggtgcttcgggggcctacggaagagcgactagacatcaagcataatcggccgcgcagagactgcgtggcagagggcaaagtgtgtgacccactgtgctcctctgggggatgctggggcccaggccctggtcagtgcttgtcctgtcgaaattatagccgaggaggtgtctgtgtgacccactgcaactttctgaatggggagcctcgagaatttgcccatgaggccgaatgcttctcctgccacccggaatgccaacccatggagggcactgccacatgcaatggctcgggctctgatacttgtgctcaatgtgcccattttcgagatgggccccactgtgtgagcagctgcccccatggagtcctaggtgccaagggcccaatctacaagtacccagatgttcagaatgaatgtcggccctgccatgagaactgcacccaggggtgtaaaggaccagagcttcaagactgtttaggacaaacactggtgctgatcggcaaaacccatctgacaatggctttgacagtgatagcaggattggtagtgattttcatgatgctgggcggcacttttctctactggcgtgggcgccggattcagaataaaagggctatgaggcgatacttggaacggggtgagagcatagagcctctggaccccagtgagaaggctaacaaagtcttggccagaatcttcaaagagacagagctaaggaagcttaaagtgcttggctcgggtgtctttggaactgtgcacaaaggagtgtggatccctgagggtgaatcaatcaagattccagtctgcattaaagtcattgaggacaagagtggacggcagagttttcaagctgtgacagatcatatgctggccattggcagcctggaccatgcccacattgtaaggctgctgggactatgcccagggtcatctctgcagcttgtcactcaatatttgcctctgggttctctgctggatcatgtgagacaacaccggggggcactggggccacagctgctgctcaactggggagtacaaattgccaagggaatgtactaccttgaggaacatggtatggtgcatagaaacctggctgcccgaaacgtgctactcaagtcacccagtcaggttcaggtggcagattttggtgtggctgacctgctgcctcctgatgataagcagctgctatacagtgaggccaagactccaattaagtggatggcccttgagagtatccactttgggaaatacacacaccagagtgatgtctggagctatggtgtgacagtttgggagttgatgaccttcggggcagagccctatgcagggctacgattggctgaagtaccagacctgctagagaagggggagcggttggcacagccccagatctgcacaattgatgtctacatggtgatggtcaagtgttggatgattgatgagaacattcgcccaacctttaaagaactagccaatgagttcaccaggatggcccgagacccaccacggtatctggtcataaagagagagagtgggcctggaatagcccctgggccagagccccatggtctgacaaacaagaagctagaggaagtagagctggagccagaactagacctagacctagacttggaagcagaggaggacaacctggcaaccaccacactgggctccgccctcagcctaccagttggaacacttaatcggccacgtgggagccagagccttttaagtccatcatctggatacatgcccatgaaccagggtaatcttggggagtcttgccaggagtctgcagtttctgggagcagtgaacggtgcccccgtccagtctctctacacccaatgccacggggatgcctggcatcagagtcatcagaggggcatgtaacaggctctgaggctgagctccaggagaaagtgtcaatgtgtaggagccggagcaggagccggagcccacggccacgcggagatagcgcctaccattcccagcgccacagtctgctgactcctgttaccccactctccccacccgggttagaggaagaggatgtcaacggttatgtcatgccagatacacacctcaaaggtactccctcctcccgggaaggcaccctttcttcagtgggtctcagttctgtcctgggtactgaagaagaagatgaagatgaggagtatgaatacatgaaccggaggagaaggcacagtccacctcatccccctaggccaagttcccttgaggagctgggttatgagtacatggatgtggggtcagacctcagtgcctctctgggcagcacacagagttgcccactccaccctgtacccatcatgcccactgcaggcacaactccagatgaagactatgaatatatgaatcggcaacgagatggaggtggtcctgggggtgattatgcagccatgggggcctgcccagcatctgagcaagggtatgaagagatgagagcttttcaggggcctggacatcaggccccccatgtccattatgcccgcctaaaaactctacgtagcttagaggctacagactctgcctttgataaccctgattactggcatagcaggcttttccccaaggctaatgcccagagaacgtaactcctgctccctgtggcactcagggagcatttaatggcagctagtgcctttagagggtaccgtcttctccctattccctctctctcccaggtcccagccccttttccccagtcccagacaattccattcaatctttggaggcttttaaacattttgacacaaaattcttatggtatgtagccagctgtgcactttcttctctttcccaaccccaggaaaggttttccttattttgtgtgctttcccagtcccattcctcagcttcttcacaggcactcctggagatatgaaggattactctccatatcccttcctctcaggctcttgactacttggaactaggctcttatgtgtgcctttgtttcccatcagactgtcaagaagaggaaagggaggaaacctagcagaggaaagtgtaattttggtttatgactcttaaccccctagaaagacagaagcttaaaatctgtgaagaaagaggttaggagtagatattgattactatcataattcagcacttaactatgagccaggcatcatactaaacttcacctacattatctcacttagtcctttatcatccttaaaacaattctgtgacatacatattatctcattttacacaaagggaagtcgggcatggtggctcatgcctgtaatctcagcactttgggaggctgaggcagaaggattacctgaggcaaggagtttgagaccagcttagccaacatagtaagacccccatctctttaaaaaaaaaaaaaaaaaaaaaaaaaaaactttagaactgggtgcagtggctcatgcctgtaatcccagccagcactttgggaggctgagatgggaagatcacttgagcccagaattagagataagcctatggaaacatagcaagacactgtctctacaggggaaaaaaaaaaaagaaactgagccttaaagagatgaaataaattaagcagtagatccaggatgcaaaatcctcccaattcctgtgcatgtgctcttattgtaaggtgccaagaaaaactgatttaagttacagcccttgtttaaggggcactgtttcttgtttttgcactgaatcaagtctaaccccaacagccacatcctcctatacctagacatctcatctcaggaagtggtggtgggggtagtcagaaggaaaaataactggacatctttgtgtaaaccataatccacatgtgccgtaaatgatcttcactccttatccgagggcaaattcacaaggatccccaagatccacttttagaagccattctcatcca

SEQ ID NO: 27 - DNA, 1355 bp, Homo sapiens
  gene (1)..(1355): Accession No. NM_001924
cagtggctggtaggcagtggctgggaggcagcggcccaattagtgtcgtgcggcccgtggcgaggcgaggtccggggagcgagcgagcaagcaaggcgggaggggtggccggagctgcggcggctggcacaggaggaggagcccgggcgggcgaggggcggccggagagcgccagggcctgagctgccggagcggcgcctgtgagtgagtgcagaaagcaggcgcccgcgcgctagccgtggcaggagcagcccgcacgccgcgctctctccctgggcgacctgcagtttgcaatatgactttggaggaattctcggctggagagcagaagaccgaaaggatggataaggtgggggatgccctggaggaagtgctcagcaaagccctgagtcagcgcacgatcactgtcggggtgtacgaagcggccaagctgctcaacgtcgaccccgataacgtggtgttgtgcctgctggcggcggacgaggacgacgacagagatgtggctctgcagatccacttcaccctgatccaggcgttttgctgcgagaacgacatcaacatcctgcgcgtcagcaacccgggccggctggcggagctcctgctcttggagaccgacgctggccccgcggcgagcgagggcgccgagcagcccccggacctgcactgcgtgctggtgacgaatccacattcatctcaatggaaggatcctgccttaagtcaacttatttgtttttgccgggaaagtcgctacatggatcaatgggttccagtgattaatctccctgaacggtgatggcatctgaatgaaaataactgaaccaaattgcactgaagtttttgaaatacctttgtagttactcaagcagttactccctacactgatgcaaggattacagaaactgatgccaaggggctgagtgagttcaactacatgttctgggggcccggagatagatgactttgcagatggaaagaggtgaaaatgaagaaggaagctgtgttgaaacagaaaaataagtcaaaaggaacaaaaattacaaagaaccatgcaggaaggaaaactatgtattaatttagaatggttgagttacattaaaataaaccaaatatgttaaagtttaagtgtgcagccatagtttgggtatttttggtttatatgccctcaagtaaaagaaaagccgaaagggttaatcatatttgaaaaccatattttattgtattttgatgagatattaaattctcaaagttttattataaattctactaagttattttatgacatgaaaagttatttatgctataaattttttgaaacacaatacctacaataaactggtatgaataattgcatcatt

SEQ ID NO: 28 - DNA, 1024 bp, Homo sapiens
  gene (1)..(1024): Accession No. NM_002083
cttcctggctcctccttcctccccacccctctaataggctcataagtgggctcaggcctctctgcggggctcactctgcgcttcaccatggctttcattgccaagtccttctatgacctcagtgccatcagcctggatggggagaaggtagatttcaatacgttccggggcagggccgtgctgattgagaatgtggcttcgctctgaggcacaaccacccgggacttcacccagctcaacgagctgcaatgccgctttcccaggcgcctggtggtccttggcttcccttgcaaccaatttggacatcaggagaactgtcagaatgaggagatcctgaacagtctcaagtatgtccgtcctgggggtggataccagcccaccttcacccttgtccaaaaatgtgaggtgaatgggcagaacgagcatcctgtcttcgcctacctgaaggacaagctcccctacccttatgatgacccattttccctcatgaccgatcccaagctcatcatttggagccctgtgcgccgctcagatgtggcctggaactttgagaagttcctcatagggccggagggagagcccttccgacgctacagccgcaccttcccaaccatcaacattgagcctgacatcaagcgcctccttaaagttgccatatagatgtgaactgctcaacacacagatctcctactccatccagtcctgaggagccttaggatgcagcatgccttcaggagacactgctggacctcagcattcccttgatatcagtccccttcactgcagagccttgcctttcccctctgcctgtttccttttcctctcccaaccctctggttggtgattcaacttgggctccaagacttgggtaagctctgggccttcacagaatgatggcaccttcctaaaccctcatgggtggtgtctgagaggcgtgaagggcctggagccactctgctagaagagaccaataaagggcaggtgtggaaacggcaaaaaaaaaaaaaaaaaaaaaaaaaaaaaa

SEQ ID NO: 29 - DNA, 7134 bp, Homo sapiens
  gene (1)..(7134): Accession No. NM_002093
cgggcttgtgccgccgccgccgccgccgccgcccgggccaagtgacaaaggaaggaaggaagcgaggaggagccggccccgcagccgctgacagggctctgggctggggcaaagcgcggacacttcctgagcgggcaccgagcagagccgaggggcgggagggcggccgagctgttgccgcggacgggggagggggccccgagggacggaagcggttgccgggttcccatgtccccggcgaatggggaacagtcgaggagccgctgcctggggtctgaagggagctgcctccgccaccgccatggccgctggatccagccgccgcctgcagctgctcctggcgcaatgaggagaggagccgccgccaccgccaccgcccgcctctgactgactcgcgactccgccgccctctagttcgccgggcccctgccgtcagcccgccggatcccgcggcttgccggagctgcagcgtttcccgtcgcatctccgagccaccccctccctccctctccctccctcctacccatccccctttctcttcaagcgtgagactcgtgatccttccgccgcttcccttcttcattgactcggaaaaaaaatccccgaggaaaatataatattcgaagtactcattttcaatcaagtatttgcccccgtttcacgtgatacatatttttttaggatttgccctctcttttctctcctcccaggaaagggaggggaaagaattgtattttttcccaagtcctaaatcatctatatgttaaatatccgtgccgatctgtcttgaaggagaaatatatcgcttgttttgttttttatagtatacaaaaggagtgaaaagccaagaggacgaagtctttttctttttcttctgtgggagaacttaatgctgcatttatcgttaacctaacaccccaacataaagacaaaaggaagaaaaggaggaaggaaggaaaaggtgattcgcgaagagagtgatcatgtcagggcggcccagaaccacctcctttgcggagagctgcaagccggtgcagcagccttcagcttttggcagcatgaaagttagcagagacaaggacggcagcaaggtgacaacagtggtggcaactcctgggcagggtccagacaggccacaagaagtcagctatacagacactaaagtgattggaaatggatcatttggtgtggtatatcaagccaaactttgtgattcaggagaactggtcgccatcaagaaagtattgcaggacaagagatttaagaatcgagagctccagatcatgagaaagctagatcactgtaacatagtccgattgcgttatttcttctactccagtggtgagaagaaagatgaggtctatcttaatctggtgctggactatgttccggaaacagtatacagagttgccagacactatagtcgagccaaacagacgctccctgtgatttatgtcaagttgtatatgtatcagctgttccgaagtttagcctatatccattcctttggaatctgccatcgggatattaaaccgcagaacctcttgttggatcctgatactgctgtattaaaactctgtgactttggaagtgcaaagcagctggtccgaggagaacccaatgtttcgtatatctgttctcggtactatagggcaccagagttgatctttggagccactgattatacctctagtatagatgtatggtctgctggctgtgtgttggctgagctgttactaggacaaccaatatttccaggggatagtggtgtggatcagttggtagaaataatcaaggtcctgggaactccaacaagggagcaaatcagagaaatgaacccaaactacacagaatttaaattccctcaaattaaggcacatccttggactaaggattcgtcaggaacaggacatttcacctcaggagtgcgggtcttccgaccccgaactccaccggaggcaattgcactgtgtagccgtctgctggagtatacaccaactgcccgactaacaccactggaagcttgtgcacattcattttttgatgaattacgggacccaaatgtcaaactaccaaatgggcgagacacacctgcactcttcaacttcaccactcaagaactgtcaagtaatccacctctggctaccatccttattcctcctcatgctcggattcaagcagctgcttcaacccccacaaatgccacagcagcgtcagatgctaatactggagaccgtggacagaccaataatgctgcttctgcatcagcttccaactccacctgaacagtcccgagcagccagctgcacaggaaaaaccaccagttacttgagtgtcactcagcaacactggtcacgtttggaaagaatattaaaaagagaaaaaaatcctgttcattttagtgttcaatttttttattattattgttgttcttatttaaccttgtaaaatatctataaatacaaaccaatttcattgtattctcactttgagggagatccagggggtgggaggggttgtggggagggggaaagcggagcactagaacatacaatctctctcccacgacaatctttttttattaaaagtctgctgttgtatactttaaaaacaggactcctgcctcatgccccttccacaaaagaagaaaacctttttctgtgctgatgggtttttttgaactttgttttcttttaaagtctagtgtgagactttggtatagtgcacagcttgaaattggttgggagcttagcaggtataactcaacggggacttaaatgtcacttgtaaaattaatccatatcttcgggtatttatagacttgcctttggcatgttggtggcaggtgtggcagacaaagaaatgtgtatcattcgtaacccagggaggtcaataaagtttggaactctacagggaagattcttagtagatttgttaaggttttgttttgctctcagttagtgctagtgatgtagaggcttgtacaggaggctgccagaggggaagcagcaagcaagactcaggcacacatgctctacaggtggctctttgtttgcctgaccaaagttctttgcaaatcttagcacagtttcaaactagtgacctgggaggagatggaaggggtgttgagcaggctgagctagctgctgaggtcaaaggctgatgagcccagaggaaggggacaggtcagggatacatctcaccactgtgaataagtttgtccagatttttttctaaagttacttcccttggaaagatacacttgagaggacattgtagttaaataatgtgaactgtaacagtcatctactggtttatttttcatattttttaattgaaaattgagcttgcagaaatagccacattctacacatagttctaattttaaatccaaatctagaatctgtatttaatttgttttttaacctcatgctttttacatttatttattgatgcatgtcagatggtagaaatattaaaaactacacatcagaatgatacagtcacttatacctgctgactttataggaaagctgatgatataaatgtgtgtatatatgttatatatacatatattcaatactgcctttttttttgtctacagtatcaaaattgactggttgaagcatgagaagaatgtttcccccacacccagttaagagtttttgtgtctgttttctttgtgtatcagtgaacgatgttaagaatcagtctctctttttgaagaaaaagcaatattccttggaaagcaaggagaattgaaggactatgtttgccgtgaggaaatagattttcatgactagtttgttttatacttttaaggttggcatctatgtgggccttatatactctaaaatgaactttagtcaccttggtgcttatgggccattacttgacctatgaatctttaaggcacaatcagttgtactttacatttaaagatcacttgagtgatggccgcctttccctcctacccgctccttccccacatgccttccaaggttagctggtaactgtagggctgcagagctgagcccatggttgtgtgtaacttgccctcaccctcctcattgccaccttaggtcactttatgggtctcgtcctccagagggttcggaagtggagtctgttggcagccctcctgcaggccctagcaccctgtcctgctccttaactgtgtgtgtgactctccaagagagttgtcctgcctgctgaagtgaaccagtacccagaaagacaactgtgagccatcttggttttcactcgctgtttagctgaggtcttgggccacaaaaggggtttcacaaacctctggatatatcagagtttatgagaaaggaaacatgctcagtcaaaccaaatcaaacaaattgaattttatgttttataaagtgcttctgaaagctaagatttgaaagaagtctgaaatcaaagtatttggcagcataactccttaaaggtagtggcgttgatagaccattttcagacagaatttataaagaatctgaaaaggcaggtctgtgatagagaaatggacctgcattcagatccaactgcccagcaagcgtttggatgcagacactgctctggacgtggtatactccccagagtccataaaaatcagtgcttattttaggaaacaggttgccccccacaactggggtaaaagaagagagaaaagtcacgcttttctctcatttcattgtgtgtgcatgtgtgcgtgtgtgtgtgtgtgtgtgtgtgctgagatgtgtgatttttctttctcaaggatcatggtgggatcacagaactcttttatacaagtgagatccaggtctctgaatatctttttgtatataataataataaaaagctcctcaccaaattcaagcttgtacattatattttctttctgtgtttttaaatttaagttttattgttttgtatgtaaatatgtggacccaggaactgttattaatgagcaaaaagttactgttcagggcagtgattctgtttaataatcagacaaaatgtagacgagctttttaaagccatatagttttaactctgtacagtaggtaccggcctgtattattgtaacaataactctagcaatgtatagtgtatctatatagtttggagtgccttcgcttccatgtgtttttttttttaatttgttcttttttaaattttaattggtttcctttatccatgtctccctgtccaccccctttccctttgaaataataactcactcataacagtatctttgccccttccacagttaagtttcagtgataccatactcaggagtgggaagaggaaatcatattcgtaatttcatttcgttgaagccctgcctttgttttggttctgaatgtctttcctcctcggtagcagtgagaccggtttcatttcatacttagtccattcagggacttagtgtagcaccagggagccctagagctggaggatatcgaatagattaaattttgctcgtctcttccacaagccctaaccatgggtcttaaaaacagcagattctgggagccttccatgctctctctctctcctcttttatctacttccctcccaaatgagagagtgacagagaattgtttttttataaatcgaagtttcttaatagtatcaggttttgatacgtcagtggtctaaaatgctatagtgcaattactagcagttactgcacggagtgccaccgtgccaatagaggactgttgttttaacaagggaactcttagcccatttcctccctcccgccatctctacccttgctcaatgaaatatcattttaatttcttttaaaaaaaatcagtttaattcttactgtgtgcccaacacgaaggccttttttgaaagaaaaatagaatgttttgcctcaaagtagtccatataaaatgtcttgaatagaagaaaaaactaccaaaccaaaggttactatttttgaaacatcgtgtgttcattccagcaaggcagaagactgcaccttctttccagtgacatgctgtgtcattttttttaagtcctcttaatttttagacacatttttggtttatgttttaacaatgtatgcctaaccagtcatcttgtctgcaccaatgcaaaggtttctgagaggagtattctctatccctgtggatatgaagacactggcatttcatctatttttccctttcctttttaaaggatttaactttggaatcttccaaaggaagtttggccaatgccagatccccaggaatttggggggttttctttcttttcaactgaaattgtatctgattcctactgttcatgttagtgatcatctaatcacagagccaaacacttttctcccctgtgtggaaaagtaggtatgctttacaataaaatctgtcttttctggtagaaacctgagccactgaaaataaaagagacaactagaagcacagtagagtcccagactgagatctacctttgagaggctttgaaagtaatccctggggtttggattattttcacaagggttatgccgttttattcaagtttgttgctccgttttgcacctctgcaataaaagcaaaatgacaaccagtacataaggggttagcttgacaaagtagacttccttgtgttaatttttaagtttttttttccttaactatatctgtctacaggcagatacagatagttgtatgaaaatctgcttgcctgtaaaatttgcatttataaatgtgttgccgatggatcacttgggcctgtacacataccaattagcgtgaccacttccatcttaaaaacaaacctaaaaaacaaaatttattatatatatatatatatatatataaaggactgtgggttgtatacaaactattgcaaacacttgtgcaaatctgtcttgatataaaggaaaagcaaaatctgtataacattattactacttgaatgcctctgtgactgatttttttttcattttaaatataaacttttttgtgaaaagtatgctcaatgttttttttccctttccccattcccttgtaaatacattttgttctatgtgacttggtttggaaatagttaactggtactgtaatttgcattaaataaaaagtaggttagcctggaaatgaaattaaaaaaaaaaaaaaaaaa

SEQ ID NO: 30 - DNA, 1320 bp, Homo sapiens
  gene (1)..(1320): Accession No. NM_000846
tttccctaacttgacccttctttcagtgggagggaactattgagaggaacaaagagcttataaatacattaggacctggaattcggttgtccagccacaaaggtgacagcatttaacaaagcttagagaaacctccaggagactgctaccatggcagagaagcccaagctccactactccaatatacggggcagaatggagtccatccggtggctcctggctgcagctggagtagagtttgaagagaaatttataaaatctgcagaagatttggacaagttaagaaatgatggatatttgatgttccagcaagtgccaatggttgagattgatgggatgaagctggtgcagaccagagccattctcaactacattgccagcaaatacaacctctatgggaaagacataaaggagaaagccctgattgatatgtatatagaaggtatagcagatttgggtgaaatgatccttcttctgccctttagtcaacctgaggaacaagatgccaagcttgccttgatccaagagaaaacaaaaaatcgctacttccctgcctttgaaaaagtcttaaagagccacggacaagactaccttgttggcaacaagctgagccgggctgacattcacctggtggaacttctctactacgtggaagagcttgactctagccttatttccagcttccctctgctgaaggccctgaaaaccagaatcagtaacctgcccacagtgaagaagtttctacagcctggcagcccaaggaagcctcccatggatgagaaatctttagaagaatcaaggaagattttcaggttttaataaaccagccatagaggtcaagaacatgcaagaccagtattctaaagttttgcaacaattaagtgctttacctaagtgttgattgtgcctgttgtgaagctaatgaactctttcaaattatatgctaattaaataatacaactcctattcacccacttagttaaaattgatttcttctcattaggatctgatgtgaattcagttttccaatctcctcctagccaacaattttcttggaattacaaattcagtaaaaatggaaactataaattatgtggtttgtttgacttttccaagaattgccctgtaacatacaatttgtcatacaatctattaaaatgccaatgtaaaaatgcacctctgacattttcaggtatgcacaggagaagagttaccatcctggataatggcataaagacattttcttcttttcctgaacagtcattttatttctgataaaagcattctttctaatgcatttgcaaaacaaaaaaaaaaaaa

SEQ ID NO: 31 - DNA, 1136 bp, Homo sapiens
  gene (1)..(1136): Accession No. NM_000854
gatcctgccacagctgctgcccacaccgcgctcagcgccttcactgccatccccgctgtccttgccgcccccgccatgggcctagagctgtttcttgacctggtgtcccagcccagccgcgccgtctacatcttcgccaagaagaatggcatccccttagagctgcgcaccgtggatttggtcaaagggcagcacaagagcaaggagttcttgcagatcaacagcctggggaaactgccgacgctcaaggatggtgatttcatcttgaccgaaagctcggccatcctgatttacctgagctgtaagtaccagacgccggaccactggtatccatctgacctgcaggctcgtgcccgtgttcatgagtacctgggctggcatgccgactgcatccgtggcacctttggtatacccctgtgggtccaggtgttggggccactcattggggtccaggtgcccgaggagaaggtggaacgcaacaggactgccatggaccaggccctgcaatggctggaggacaagttcctgggggacaggcccttcctcgctggccagcaggtgacactggctgatctcatggccctggaggagctgatgcagccggtggctctcggctatgaactgtttgagggacggccacgactggcagcatggcgtggacgagtggaggctttcctgggtgctgagctatgccaggaggcccacagcatcatcttgagcatcctggaacaggcggccaagaaaaccctcccaacaccctcaccagaggcctatcaggctatgctgcttcgaatcgccaggatcccctgaagggtctgggatgggggccaggagattagcaacaaggattcattctgttacttacttgcccctttttatctttccctcttgccccagtcccttctctccagcttcatgtgaagctctgcacagacaagacactcagtgtccttggcagtgctgctactcctcaggtgcagcatacataaccagtaagagactaaatctgcaatatataaagagctcctacaaatcagtaacatgaagaacactcaaaaattggcaaatgtcatcagtgttttaaacagaataaagattccaaacactttgaatagagaaaaaaaaaaaaaaaaaaa

SEQ ID NO: 32 - DNA, 5182 bp, Homo sapiens
  gene (1)..(5182): Accession No. NM_000612
cgcctgtccccctcccgaggcccgggctcgcgacggcagagggctccgtcggcccaaaccgagctgggcgcccgcggtccgggtgcagcctccactccgccccccagtcaccgcctcccccggcccctcgacgtggcgcccttccctccgcttctctgtgctccccgcgcccctcttggcgtctggccccggcccccgctctttctcccgcaaccttcccttcgctccctcccgtcccccccagctcctagcctccgactccctccccccctcacgcccgccctctcgccttcgccgaaccaaagtggattaattacacgctttctgtttctctccgtgctgttctctcccgctgtgcgcctgcccgcctctcgctgtcctctctccccctcgccctctcttcggcccccccctttcacgttcactctgtctctcccactatctctgcccccctctatccttgatacaacagctgacctcatttcccgataccttttcccccccgaaaagtacaacatctggcccgccccagcccgaagacagcccgtcctccctggacaatcagacgaattctccccccccccccaaaaaaaagccatccccccgctctgccccgtcgcacattcggcccccgcgactcggccagagcggcgctggcagaggagtgtccggcaggagggccaacgcccgctgttcggtttgcgacacgcagcagggaggtgggcggcagcgtcgccggcttccagacaccaatgggaatcccaatggggaagtcgatgctggtgcttctcaccttcttggccttcgcctcgtgctgcattgctgcttaccgccccagtgagaccctgtgcggcggggagctggtggacaccctccagttcgtctgtggggaccgcggcttctacttcagcaggcccgcaagccgtgtgagccgtcgcagccgtggcatcgttgaggagtgctgtttccgcagctgtgacctggccctcctggagacgtactgtgctacccccgccaagtccgagagggacgtgtcgacccctccgaccgtgcttccggacaacttccccagataccccgtgggcaagttcttccaatatgacacctggaagcagtccacccagcgcctgcgcaggggcctgcctgccctcctgcgtgcccgccggggtcacgtgctcgccaaggagctcgaggcgttcagggaggccaaacgtcaccgtcccctgattgctctacccacccaagaccccgcccacgggggcgcccccccagagatggccagcaatcggaagtgagcaaaactgccgcaagtctgcagcccggcgccaccatcctgcagcctcctcctgaccacggacgtttccatcaggttccatcccgaaaatctctcggttccacgtccccctggggcttctcctgacccagtccccgtgccccgcctccccgaaacaggctactctcctcggccccctccatcgggctgaggaagcacagcagcatcttcaaacatgtacaaaatcgattggctttaaacacccttcacataccctccccccaaattatccccaattatccccacacataaaaaatcaaaacattaaactaacccccttcccccccccccacaacaaccctcttaaaactaattggctttttagaaacaccccacaaaagctcagaaattggctttaaaaaaaacaaccaccaaaaaaaatcaattggctaaaaaaaaaaagtattaaaaacgaattggctgagaaacaattggcaaaataaaggaatttggcactccccacccccctctttctcttctcccttggactttgagtcaaattggcctggacttgagtccctgaaccagcaaagagaaaagaaggaccccagaaatcacaggtgggcacgtcgctgctaccgccatctcccttctcacgggaattttcagggtaaactggccatccgaaaatagcaacaacccagactggctcctcactcccttttccatcactaaaaatcacagagcagtcagagggacccagtaagaccaaaggaggggaggacagagcatgaaaaccaaaatccatgcaaatgaaatgtaattggcacgaccctcacccccaaatcttacatctcaattcccatcctaaaaagcactcatactttatgcatccccgcagctacacacacacaacacacagcacacgcatgaacacagcacacacacgagcacagcacacacacaaacgcacagcacacacagcacacagatgagcacacagcacacacacaaacgcacagcacacacacgcacacacatgcacacacagcacacaaacgcacggcacacacacgcacacacatgcacacacagcacacacacaaacgcacagcacacacaaacgcacagcacacacgcacacacagcacacacacgagcacacagcacacaaacgcacagcacacgcacacacatgcacacacagcacacacactagcacacagcacacacacaaagacacagcacacacatgcacacacagcacacacacgcgaacacagcacacacgaacacagcacacacagcacacacacaaacacagcacacacatgcacacagcacacgcacacacagcacacacatgaacacagcacacagcacacacatgcacacacagcacacacgcatgcacagcacacatgaacacagcacacacacaaacacacagcacacacatgcacacacagcacacacactcatgcgcagcacatacatgaacacagctcacagcacacaaacacgcagcacacacgttgcacacgcaagcacccacctgcacacacacatgcgcacacacacgcacacccccacaaaattggatgaaaacaataagcatatctaagcaactacgatatctgtatggatcaggccaaagtcccgctaagattctccaatgttttcatggtctgagccccgctcctgttcccatctccactgcccctcggccctgtctgtgccctgcctctcagaggagggggctcagatggtgcggcctgagtgtgcggccggcggcatttgggatacacccgtagggtgggcggggtgtgtcccaggcctaattccatctttccaccatgacagagatgcccttgtgaggctggcctccttggcgcctgtccccacggcccccgcagcgtgagccacgatgctccccataccccacccattcccgatacaccttacttactgtgtgttggcccagccagagtgaggaaggagtttggccacattggagatggcggtagctgagcagacatgcccccacgagtagcctgactccctggtgtgctcctggaaggaagatcttggggacccccccaccggagcacacctagggatcatctttgcccgtctcctggggaccccccaagaaatgtggagtcctcgggggccgtgcactgatgcggggagtgtgggaagtctggcggttggaggggtgggtggggggcagtgggggctgggcggggggagttctggggtaggaagtggtcccgggagattttggatggaaaagtcaggaggattgacagcagacttgcagaattacatagagaaattaggaacccccaaatttcatgtcaattgatctattccccctctttgtttcttggggcatttttccttttttttttttttttgttttttttttacccctccttagctttatgcgctcagaaaccaaattaaaccccccccccatgtaacaggggggcagtgacaaaagcaagaacgcacgaagccagcctggagaccaccacgtcctgccccccgccatttatcgccctgattggattttgtttttcatctgtccctgttgcttgggttgagttgagggtggagcctcctggggggcactggccactgagcccccttggagaagtcagaggggagtggagaaggccactgtccggcctggcttctggggacagtggctggtccccagaagtcctgagggcggaggggggggttgggcagggtctcctcaggtgtcaggagggtgctcggaggccacaggagggggctcctggctggcctgaggctggccggaggggaaggggctagcaggtgtgtaaacagagggttccatcaggctggggcagggtggccgccttccgcacacttgaggaaccctcccctctccctcggtgacatcttgcccgcccctcagcaccctgccttgtctccaggaggtccgaagctctgtgggacctcttgggggcaaggtggggtgaggccggggagtagggaggtcaggcgggtctgagcccacagagcaggagagctgccaggtctgcccatcgaccaggttgcttgggccccggagcccacgggtctggtgatgccatagcagccaccaccgcggcgcctagggctgcggcagggactcggcctctgggaggtttacctcgcccccacttgtgcccccagctcagcccccctgcacgcagcccgactagcagtctagaggcctgaggcttctgggtcctggtgacggggctggcatgaccccgggggtcgtccatgccagtccgcctcagtcgcagagggtccctcggcaagcgccctgtgagtgggccattcggaacattggacagaagcccaaagagccaaattgtcacaattgtggaacccacattggcctgagatccaaaacgcttcgaggcaccccaaattacctgcccattcgtcaggacacccacccacccagtgttatattctgcctcgccggagtgggtgttcccgggggcacttgccgaccagccccttgcgtccccaggtttgcagctctcccctgggccactaaccatcctggcccgggctgcctgtctgacctccgtgcctagtcgtggctctccatcttgtctcctccccgtgtccccaatgtcttcagtggggggccccctcttgggtcccctcctctgccatcacctgaagacccccacgccaaacactgaatgtcacctgtgcctgccgcctcggtccaccttgcggcccgtgtttgactcaactcaactcctttaacgctaatatttccggcaaaatcccatgcttgggttttgtctttaaccttgtaacgcttgcaatcccaataaagcattaaaagtcatgaaaaaaaaaaaaaaaaaa

SEQ ID NO: 33 - DNA, 2246 bp, Homo sapiens
  gene (1)..(2246): Accession No. NM_001552
aaagtccgggggagccggtcccgggcagccgctcagccccctgcccctcgccgcccgccgcctgcctgggccgggccgaggatgcggcgcagcgcctcggcggccaggcttgctcccctccggcacgcctgctaacttcccccgctacgtccccgttcgcccgccgggccgccccgtctccccgcgccctccgggtcgggtcctccaggagcgccaggcgctgccgccgtgtgccctccgccgctcgcccgcgcgcccgcgctccccgcctgcgcccagcgccccgcgcccgcgcccagtcctcgggcggtcatgctgcccctctgcctcgtggccgccctgctgctggccgccgggcccgggccgagcctgggcgacgaagccatccactgcccgccctgctccgaggagaagctggcgcgctgccgcccccccgtgggctgcgaggagctggtgcgagagccgggctgcggctgttgcgccacttgcgccctgggcttggggatgccctgcggggtgtacaccccccgttgcggctcgggcctgcgctgctacccgccccgaggggtggagaagcccctgcacacactgatgcacgggcaaggcgtgtgcatggagctggcggagatcgaggccatccaggaaagcctgcagccctctgacaaggacgagggtgaccaccccaacaacagcttcagcccctgtagcgcccatgaccgcaggtgcctgcagaagcacttcgccaaaattcgagaccggagcaccagtgggggcaagatgaaggtcaatggggcgccccgggaggatgcccggcctgtgccccagggctcctgccagagcgagctgcaccgggcgctggagcggctggccgcttcacagagccgcacccacgaggacctctacatcatccccatccccaactgcgaccgcaacggcaacttccaccccaagcagtgtcacccagctctggatgggcagcgtggcaagtgctggtgtgtggaccggaagacgggggtgaagcttccggggggcctggagccaaagggggagctggactgccaccagctggctgacagctttcgagagtgaggcctgccagcaggccagggactcagcgtcccctgctactcctgtgctctggaggctgcagagctgacccagagtggagtctgagtctgagtcctgtctctgcctgcggcccagaagtttccctcaaatgcgcgtgtgcacgtgtgcgtgtgcgtgcgtgtgtgtgtgtttgtgagcatgggtgtgcccttggggtaagccagagcctggggtgttctctttggtgttacacagcccaagaggactgagactggcacttagcccaagaggtctgagccctggtgtgtttccagatcgatcctggattcactcactcactcattccttcactcatccagccacctaaaaacatttactgaccatgtactacgtgccagctctagttttcagccttgggaggttttattctgacttcctctgattttggcatgtggagacactcctataaggagagttcaagcctgtgggagtagaaaaatctcattcccagagtcagaggagaagagacatgtaccttgaccatcgtccttcctctcaagctagccagagggtgggagcctaaggaagcgtggggtagcagatggagtaatggtcacgaggtccagacccactcccaaagctcagacttgccaggctccctttctcttcttccccaggtccttcctttaggtctggttgttgcaccatctgcttggttggctggcagctgagagccctgctgtgggagagcgaagggggtcaaaggaagacttgaagcacagagggctagggaggtggggtacatttctctgagcagtcagggtgggaagaaagaatgcaagagtggactgaatgtgcctaatggagaagacccacgtgctaggggatgaggggcttcctgggtcctgttccctaccccatttgtggtcacagccatgaagtcaccgggatgaacctatccttccagtggctcgctccctgtagctctgcctccctctccatatctccttcccctacacctccctccccacacctccctactcccctgggcatcttctggcttgactggatggaaggagacttaggaacctaccagttggccatgatgtcttttcttctttttcttttttttaacaaaacagaacaaaaccaaaaaatgtccagatgaaaaaaaaaaa

SEQ ID NO: 34 - DNA, 1666 bp, Homo sapiens
  gene (1)..(1666): Accession No. NM_000584
ctccataaggcacaaactttcagagacagcagagcacacaagcttctaggacaagagccaggaagaaaccaccggaaggaaccatctcactgtgtgtaaacatgacttccaagctggccgtggctctcttggcagccttcctgatttctgcagctctgtgtgaaggtgcagttttgccaaggagtgctaaagaacttagatgtcagtgcataaagacatactccaaacctttccaccccaaatttatcaaagaactgagagtgattgagagtggaccacactgcgccaacacagaaattattgtaaagctttctgatggaagagagctctgtctggaccccaaggaaaactgggtgcagagggttgtggagaagtttttgaagagggctgagaattcataaaaaaattcattctctgtggtatccaagaatcagtgaagatgccagtgaaacttcaagcaaatctacttcaacacttcatgtattgtgtgggtctgttgtagggttgccagatgcaatacaagattcctggttaaatttgaatttcagtaaacaatgaatagtttttcattgtaccatgaaatatccagaacatacttatatgtaaagtattatttatttgaatctacaaaaaacaacaaataatttttaaatataaggattttcctagatattgcacgggagaatatacaaatagcaaaattgaggccaagggccaagagaatatccgaactttaatttcaggaattgaatgggtttgctagaatgtgatatttgaagcatcacataaaaatgatgggacaataaattttgccataaagtcaaatttagctggaaatcctggatttttttctgttaaatctggcaaccctagtctgctagccaggatccacaagtccttgttccactgtgccttggtttctcctttatttctaagtggaaaaagtattagccaccatcttacctcacagtgatgttgtgaggacatgtggaagcactttaagttttttcatcataacataaattattttcaagtgtaacttattaacctatttattatttatgtatttatttaagcatcaaatatttgtgcaagaatttggaaaaatagaagatgaatcattgattgaatagttataaagatgttatagtaaatttattttattttagatattaaatgatgttttattagataaatttcaatcagggtttttagattaaacaaacaaacaattgggtacccagttaaattttcatttcagataaacaacaaataattttttagtataagtacattattgtttatctgaaattttaattgaactaacaatcctagtttgatactcccagtcttgtcattgccagctgtgttggtagtgctgtgttgaattacggaataatgagttagaactattaaaacagccaaaactccacagtcaatattagtaatttcttgctggttgaaacttgtttattatgtacaaatagattcttataatattatttaaatgactgcatttttaaatacaaggctttatatttttaactttaagatgtttttatgtgctctccaaattttttttactgtttctgattgtatggaaatataaaagtaaatatgaaacatttaaaatataatttgttgtcaaagtaaaaaaaaaaaaaaa

SEQ ID NO: 35 - DNA, 4902 bp, Homo sapiens
  gene (1)..(4902): Accession No. NM_005501
tttccccggaaggaaagcgcagcccgggctgggctcgcaaggtggggaggtgcgggactgggcgtggggaggcggggcgcgcgccgggggacccctccctcctgtcctccttgcggtcgaccggtgcgcttgccagatccgccgcgaagccgggatcgaaggcgacagcgcggccaagggggcgcggccgggacaagctgggggccggttgcccggggcagggacggcggcgacccggccgctggggaggcaggaagatagacccacggatcttaggaagggatccgagagcgcagctgtgaaactggctggggctgggggcacgaaaccgatcagcgctacggagcgcagcggccggcgggttccagtgtcctccggcggcgcggggagcaggtgaacaggtcctcacgcccagctccgcgccctcacgcgctctcgccgggaccccgcttccgctggcagccatgggccccggccccagccgcgcgccccgcgccccacgcctgatgctctgtgcgctcgccttgatggtggcggccggcggctgcgtcgtctccgccttcaacctggatacccgattcctggtagtgaaggaggccgggaacccgggcagcctcttcggctactcggtcgccctccatcggcagacagagcggcagcagcgctacctgctcctggctggtgccccccgggagctcgctgtgcccgatggctacaccaaccggactggtgctgtgtacctgtgcccactcactgcccacaaggatgactgtgagcggatgaacatcacagtgaaaaatgaccctggccatcacattattgaggacatgtggcttggagtgactgtggccagccagggccctgcaggcagagttctggtctgtgcccaccgctacacccaggtgctgtggtcagggtcagaagaccagcggcgcatggtgggcaagtgctacgtgcgaggcaatgacctagagctggactccagtgatgactggcagacctaccacaacgagatgtgcaatagcaacacagactacctggagacgggcatgtgccagctgggcaccagcggtggcttcacccagaacactgtgtacttcggcgcccccggtgcctacaactggaaaggaaacagctacatgattcagcgcaaggagtgggacttatctgagtatagttacaaggacccagaggaccaaggaaacctctatattgggtacacgatgcaggtaggcagcttcatcctgcaccccaaaaacatcaccattgtgacaggtgccccacggcaccgacatatgggcgcggtgttcttgctgagccaggaggcaggcggagacctgcggaggaggcaggtgctggagggctcgcaggtgggcgcctattttggcagcgccattgccctggcagacctgaacaatgatgggtggcaggacctcctggtgggcgccccctactacttcgagaggaaagaggaagtagggggtgccatctatgtcttcatgaaccaggcgggaacctccttccctgctcacccctcactccttcttcatggccccagtggctctgcctttggtttatctgtggccagcattggtgacatcaaccaggatggatttcaggatattgctgtgggagctccgtttgaaggcttgggcaaagtgtacatctatcacagtagctctaaggggctccttagacagccccagcaggtaatccatggagagaagctgggactgcctgggttggccaccttcggctattccctcagtgggcagatggatgtggatgagaacttctacccagaccttctagtgggaagcctgtcagaccacattgtgctgctgcgggcccggcccgtcatcaacatcgtccacaagaccttggtgcccaggccagctgtgctggaccctgcactttgcacggccacctcttgtgtgcaagtggagctgtgctttgcttacaaccagagtgccgggaaccccaactacaggcgaaacatcaccctggcctacactctggaggctgacagggaccgccggccgccccggctccgctttgccggcagtgagtccgctgtcttccacggcttcttctccatgcccgagatgcgctgccagaagctggagctgctcctgatggacaacctccgtgacaaactccgccccatcatcatctccatgaactactctttacctttgcggatgcccgatcgcccccggctggggctgcggtccctggacgcctacccgatcctcaaccaggcacaggctctggagaaccacactgaggtccagttccagaaggagtgcgggcctgacaacaagtgtgagagcaacttgcagatgcgggcagccttcgtgtcagagcagcagcagaagctgagcaggctccagtacagcagagacgtccggaaattgctcctgagcatcaacgtgacgaacacccggacctcggagcgctccggggaggacgcccacgaggcgctgctcaccctggtggtgcctcccgccctgctgctgtcctcagtgcgcccccccggggcctgccaagctaatgagaccatcttttgcgagctggggaaccccttcaaacggaaccagaggatggagctgctcatcgcctttgaggtcatcggggtgaccctgcacacaagggaccttcaggtgcagctgcagctctccacgtcgagtcaccaggacaacctgtggcccatgatcctcactctgctggtggactatacactccagacctcgcttagcatggtaaatcaccggctacaaagcttctttggggggacagtgatgggtgagtctggcatgaaaactgtggaggatgtaggaagccccctcaagtatgaattccaggtgggcccaatgggggaggggctggtgggcctggggaccctggtcctaggtctggagtggccctacgaagtcagcaatggcaagtggctgctgtatcccacggagatcaccgtccatggcaatgggtcctggccctgccgaccacctggagaccttatcaaccctctcaacctcactctttctgaccctggggacaggccatcatccccacagcgcaggcggcgacagctggatccagggggaggccagggccccccacctgtcactctggctgctgccaaaaaagccaagtctgagactgtgctgacctgtgccacagggcgtgcccactgtgtgtggctagagtgccccatccctgatgcccccgttgtcaccaacgtgactgtgaaggcacgagtgtggaacagcaccttcatcgaggattacagagactttgaccgagtccgggtaaatggctgggctaccctattcctccgaaccagcatccccaccatcaacatggagaacaagaccacgtggttctctgtggacattgactcggagctggtggaggagctgccggccgaaatcgagctgtggctggtgctggtggccgtgggtgcagggctgctgctgctggggctgatcatcctcctgctgtggaagtgtgacttctttaagcggacccgctattatcagatcatgcccaagtaccacgcagtgcggatccgggaggaggagcgctacccacctccagggagcaccctgcccaccaagaagcactgggtgaccagctggcagactcgggaccaatactactgacgtcctccctgatcccaccccctcctcccccagtgtcccctttcttcctatttatcataagttatgcctctgacagtccacaggggccaccacctttggctggtagcagcaggctcaggcacatacacctcgtcaagagcatgcacatgctgtctggccctggggatcttcccacaggagggccagcgctgtggaccttacaacgccgagtgcactgcattcctgtgccctagatgcacgtggggcccactgctcgtggactgtgctggtgcatcacggatggtgcatgggctcgccgtgtctcagcctctgccagcgccaaaacaagccaaagagcctcccaccagagccgggaggaaaaggcccctgcaatgtggtgacacctccccctttcacactggatccatcttgagccacagtcactggattgactttgctgtcaaaactactgacagggagcagcccccgggccgctggctggtgggcccccaatgacacccatgccagagaggtggggatcctgcctaaggttgtctacgggggcacttggaggacctggcgtgctcagacccaacagcaaaggaactagaaagaaggacccagaacggcttgctttcctgcatctctgtgaagcctctctccttggccacagactgaactcgcagggaatgcagcaggaaggaacaaagacaggcaaacggcaacgtagcctgggctcactgtgctggggcacggcgggatcctccacagagaggaggggaccaattctggacagacagatgttgggaggatacagaggagatgccacttctcactcaccactaccagccagcctcagaaggccccagagagaccctgcaagaccacggagggagcgacacttgaatgtagaataggcagggggccctgccccaccccatccagccagaccccacgctgaccatgcgtcaggggcctagaggtggagttcttagctatccttggctttcagagccagcctggctctgccccctcccccatgggctgtgtcctaaggcccatttgagaagctgaggctagttccagaaaacctctcctgacccctgcctgttggcaggcccactccccagccccagccccttccatggtactgtagcaggggaattccctccccctccttgtgccttctttgtatataggcttctcacggcgaccaataaacagctcccagtttgtatgcaaaaaaaaaaaaaaaaaa

SEQ ID NO: 36 - DNA, 1490 bp, Homo sapiens
  gene (1)..(1490): Accession No. NM_002276
agatatccgcccctgacaccattcctcccttcccccctccaccggccgcgggcataaaaggcgccaggtgagggcctcgccgctcctcccgcgaatcgcagcttctgagaccagggttgctccgtccgtgctccgcctcgccatgacttcctacagctatcgccagtcgtcggccacgtcgtccttcggaggcctgggcggcggctccgtgcgttttgggccgggggtcgcctttcgcgcgcccagcattcacgggggctccggcggccgcggcgtatccgtgtcctccgcccgctttgtgtcctcgtcctcctcgggggcctacggcggcggctacggcggcgtcctgaccgcgtccgacgggctgctggcgggcaacgagaagctaaccatgcagaacctcaacgaccgcctggcctcctacctggacaaggtgcgcgccctggaggcggccaacggcgagctagaggtgaagatccgcgactggtaccagaagcaggggcctgggccctcccgcgactacagccactactacacgaccatccaggacctgcgggacaagattcttggtgccaccattgagaactccaggattgtcctgcagatcgacaatgcccgtctggctgcagatgacttccgaaccaagtttgagacggaacaggctctgcgcatgagcgtggaggccgacatcaacggcctgcgcagggtgctggatgagctgaccctggccaggaccgacctggagatgcagatcgaaggcctgaaggaagagctggcctacctgaagaagaaccatgaggaggaaatcagtacgctgaggggccaagtgggaggccaggtcagtgtggaggtggattccgctccgggcaccgatctcgccaagatcctgagtgacatgcgaagccaatatgaggtcatggccgagcagaaccggaaggatgctgaagcctggttcaccagccggactgaagaattgaaccgggaggtcgctggccacacggagcagctccagatgagcaggtccgaggttactgacctgcggcgcacccttcagggtcttgagattgagctgcagtcacagctgagcatgaaagctgccttggaagacacactggcagaaacggaggcgcgctttggagcccagctggcgcatatccaggcgctgatcagcggtattgaagcccagctgggcgatgtgcgagctgatagtgagcggcagaatcaggagtaccagcggctcatggacatcaagtcgcggctggagcaggagattgccacctaccgcagcctgctcgagggacaggaagatcactacaacaatttgtctgcctccaaggtcctctgaggcagcaggctctggggcttctgctgtcctttggagggtgtcttctgggtagagggatgggaaggaagggacccttacccccggctcttctcctgacctgccaataaaaatttatggtccaagggaaaaaaaaaaaaaaaaaaaa

SEQ ID NO: 37 - DNA, 1817 bp, Homo sapiens
  gene (1)..(1817): Accession No. NM_019010
caaccatcctgaagctacaggtgctccctcctggaatctccaatggatttcagtcgcagaagcttccacagaagcctgagctcctccttgcaggcccctgtagtcagtacagtgggcatgcagcgcctcgggacgacacccagcgtttatgggggtgctggaggccggggcatccgcatctccaactccagacacacggtgaactatgggagcgatctcacaggcggcggggacctgtttgttggcaatgagaaaatggccatgcagaacctaaatgaccgtctagcgagctacctagaaaaggtgcggaccctggagcagtccaactccaaacttgaagtgcaaatcaagcagtggtacgaaaccaacgccccgagggctggtcgcgactacagtgcatattacagacaaattgaagagctgcgaagtcagattaaggatgctcaactgcaaaatgctcggtgtgtcctgcaaattgataatgctaaactggctgctgaggacttcagactgaagtatgagactgagagaggaatacgtctaacagtggaagctgatctccaaggcctgaataaggtctttgatgacctaaccctacataaaacagatttggagattcaaattgaagaactgaataaagacctagctctcctcaaaaaggagcatcaggaggaagtcgatggcctacacaagcatctgggcaacactgtcaatgtggaggttgatgctgctccaggcctgaaccttggcgtcatcatgaatgaaatgaggcagaagtatgaagtcatggcccagaagaaccttcaagaggccaaagaacagtttgagagacagactgcagttctgcagcaacaggtcacagtgaatactgaagaattaaaaggaactgaggttcaactaacggagctgagacgcacctcccagagccttgagatagaactccagtcccatctcagcatgaaagagtctttggagcacactctagaggagaccaaggcccgttacagcagccagttagccaacctccagtcgctgttgagctctctggaggcccaactgatgcagattcggagtaacatggaacgccagaacaacgaataccatatccttcttgacataaagactcgacttgaacaggaaattgctacttaccgccgccttctggaaggagaagacgtaaaaactacagaatatcagttaagcaccctggaagagagagatataaagaaaaccaggaagattaagacagtcgtgcaagaagtagtggatggcaaggtcgtgtcatctgaagtcaaagaggtggaagaaaatatctaaatagctaccagaaggagatgctgctgaggttttgaaagaaatttggctataatcttatctttgctccctgcaagaaatcagccataagaaagcactattaatactctgcagtgattagaaggggtggggtggcgggaatcctatttatcagactctgtaattgaatataaatgttttactcagaggagctgcaaattgcctgcaaaaatgaaatccagtgagcactagaatatttaaaacatcattactgccatctttatcatgaagcacatcaattacaagctgtagaccacctaatatcaatttgtaggtaatgttcctgaaaattgcaatacatttcaattatactaaacctcacaaagtagaggaatccatgtaaattgcaaataaaccactttctaattttttcctgtttctgaaaaaaaaaaaaaaaaaaaaaaaaaaaaaaaaaaaaaaaaaaaaaaaaaaaaaaaaaaaaaaaaaaaaaaaaaaaaaaaaaa

SEQ ID NO: 38 - DNA, 1265 bp, Homo sapiens
  gene (1)..(1265): Accession No. NM_002412
ctcggccccgcccccgcgccccggatatgctgggacagcccgcgcccctagaacgctttgcgtcccgacgcccgcaggtcctcgcggtgcgcaccgtttgcgacttggtacttggaaaaatggacaaggattgtgaaatgaaacgcaccacactggacagccctttggggaagctggagctgtctggttgtgagcagggtctgcacgaaataaagctcctgggcaaggggacgtctgcagctgatgccgtggaggtcccagcccccgctgcggttctcggaggtccggagcccctgatgcagtgcacagcctggctgaatgcctatttccaccagcccgaggctatcgaagagttccccgtgccggctcttcaccatcccgttttccagcaagagtcgttcaccagacaggtgttatggaagctgctgaaggttgtgaaattcggagaagtgatttcttaccagcaattagcagccctggcaggcaaccccaaagccgcgcgagcagtgggaggagcaatgagaggcaatcctgtccccatcctcatcccgtgccacagagtggtctgcagcagcggagccgtgggcaactactccggaggactggccgtgaaggaatggcttctggcccatgaaggccaccggttggggaagccaggcttgggagggagctcaggtctggcaggggcctggctcaagggagcgggagctacctcgggctccccgcctgctggccgaaactgagtatgtgcagtaggatggatgtttgagcgacacacacgtgtaacactgcatcggatgcggggcgtggaggcaccgctgtattaaaggaagtggcagtgtcctgggaacaagcgtgtctgccctttctgtttccatattttacagcaggatgagttcagacgcccgcggtcctgcacacatttgtttccttctctaacgctgcccttgctctatttttcatgtccattaaaacaggccaagtgagtgtggaaggcctggctcatgttgggccacagcccaggatggggcagtctggcaccctcaggccacagacggctgccatagccgctgtccagggccagctaaggcccatcccaggccgtccacactagaaagctggccctgccccatccccaccatgcctcccttcctggctgtgtccatggctgtgatggcattctccactcagcagttcctagcatcccacacccaggtctcactgaaagaaaggggaacaggccatggcagtcagtgcttacagag

SEQ ID NO: 39 - DNA, 12507 bp, Homo sapiens
  gene (1)..(12507): Accession No. NM_002417
taccgggcggaggtgagcgcggcgccggctcctcctgcggcggactttgggtgcgacttgacgagcggtggttcgacaagtggccttgcgggccggatcgtcccagtggaagagttgtaaatttgcttctggccttcccctacggattatacctggccttcccctacggattatactcaacttactgtttagaaaatgtggcccacgagacgcctggttactatcaaaaggagcggggtcgacggtccccactttcccctgagcctcagcacctgcttgtttggaaggggtattgaatgtgacatccgtatccagcttcctgttgtgtcaaaacaacattgcaaaattgaaatccatgagcaggaggcaatattacataatttcagttccacaaatccaacacaagtaaatgggtctgttattgatgagcctgtacggctaaaacatggagatgtaataactattattgatcgttccttcaggtatgaaaatgaaagtcttcagaatggaaggaagtcaactgaatttccaagaaaaatacgtgaacaggagccagcacgtcgtgtctcaagatctagcttctcttctgaccctgatgagaaagctcaagattccaaggcctattcaaaaatcactgaaggaaaagtttcaggaaatcctcaggtacatatcaagaatgtcaaagaagacagtaccgcagatgactcaaaagacagtgttgctcagggaacaactaatgttcattcctcagaacatgctggacgtaatggcagaaatgcagctgatcccatttctggggattttaaagaaatttccagcgttaaattagtgagccgttatggagaattgaagtctgttcccactacacaatgtcttgacaatagcaaaaaaaatgaatctcccttttggaagctttatgagtcagtgaagaaagagttggatgtaaaatcacaaaaagaaaatgtcctacagtattgtagaaaatctggattacaaactgattacgcaacagagaaagaaagtgctgatggtttacagggggagacccaactgttggtctcgcgtaagtcaagaccaaaatctggtgggagcggccacgctgtggcagagcctgcttcacctgaacaagagcttgaccagaacaaggggaagggaagagacgtggagtctgttcagactcccagcaaggctgtgggcgccagctttcctctctatgagccggctaaaatgaagacccctgtacaatattcacagcaacaaaattctccacaaaaacataagaacaaagacctgtatactactggtagaagagaatctgtgaatctgggtaaaagtgaaggcttcaaggctggtgataaaactcttactcccaggaagctttcaactagaaatcgaacaccagctaaagttgaagatgcagctgactctgccactaagccagaaaatctctcttccaaaaccagaggaagtattcctacagatgtggaagttctgcctacggaaactgaaattcacaatgagccatttttaactctgtggctcactcaagttgagaggaagatccaaaaggattccctcagcaagcctgagaaattgggcactacagctggacagatgtgctctgggttacctggtcttagttcagttgatatcaacaactttggtgattccattaatgagagtgagggaatacctttgaaaagaaggcgtgtgtcctttggtgggcacctaagacctgaactatttgatgaaaacttgcctcctaatacgcctctcaaaaggggagaagccccaaccaaaagaaagtctctggtaatgcacactccacctgtcctgaagaaaatcatcaaggaacagcctcaaccatcaggaaaacaagagtcaggttcagaaatccatgtggaagtgaaggcacaaagcttggttataagccctccagctcctagtcctaggaaaactccagttgccagtgatcaacgccgtaggtcctgcaaaacagcccctgcttccagcagcaaatctcagacagaggttcctaagagaggagggagaaagagtggcaacctgccttcaaagagagtgtctatcagccgaagtcaacatgatattttacagatgatatgttccaaaagaagaagtggtgcttcggaagcaaatctgattgttgcaaaatcatgggcagatgtagtaaaacttggtgcaaaacaaacacaaactaaagtcataaaacatggtcctcaaaggtcaatgaacaaaaggcaaagaagacctgctactccaaagaagcctgtgggcgaagttcacagtcaatttagtacaggccacgcaaactctccttgtaccataataatagggaaagctcatactgaaaaagtacatgtgcctgctcgaccctacagagtgctcaacaacttcatttccaaccaaaaaatggactttaaggaagatctttcaggaatagctgaaatgttcaagaccccagtgaaggagcaaccgcagttgacaagcacatgtcacatcgctatttcaaattcagagaatttgcttggaaaacagtttcaaggaactgattcaggagaagaacctctgctccccacctcagagagttttggaggaaatgtgttcttcagtgcacagaatgcagcaaaacagccatctgataaatgctctgcaagccctcccttaagacggcagtgtattagagaaaatggaaacgtagcaaaaacgcccaggaacacctacaaaatgacttctctggagacaaaaacttcagatactgagacagagccttcaaaaacagtatccactgcaaacaggtcaggaaggtctacagagttcaggaatatacagaagctacctgtggaaagtaagagtgaagaaacaaatacagaaattgttgagtgcatcctaaaaagaggtcagaaggcaacactactacaacaaaggagagaaggagagatgaaggaaatagaaagaccttttgagacatataaggaaaatattgaattaaaagaaaacgatgaaaagatgaaagcaatgaagagatcaagaacttgggggcagaaatgtgcaccaatgtctgacctgacagacctcaagagcttgcctgatacagaactcatgaaagacacggcacgtggccagaatctcctccaaacccaagatcatgccaaggcaccaaagagtgagaaaggcaaaatcactaaaatgccctgccagtcattacaaccagaaccaataaacaccccaacacacacaaaacaacagttgaaggcatccctggggaaagtaggtgtgaaagaagagctcctagcagtcggcaagttcacacggacgtcaggggagaccacgcacacgcacagagagccagcaggagatggcaagagcatcagaacgtttaaggagtctccaaagcagatcctggacccagcagcccgtgtaactggaatgaagaagtggccaagaacgcctaaggaagaggcccagtcactagaagacctggctggcttcaaagagctcttccagacaccaggtccctctgaggaatcaatgactgatgagaaaactaccaaaatagcctgcaaatctccaccaccagaatcagtggacactccaacaagcacaaagcaatggcctaagagaagtctcaggaaagcagatgtagaggaagaattcttagcactcaggaaactaacaccatcagcagggaaagccatgcttacgcccaaaccagcaggaggtgatgagaaagacattaaagcatttatgggaactccagtgcagaaactggacctggcaggaactttacctggcagcaaaagacagctacagactcctaaggaaaaggcccaggctctagaagacctggctggctttaaagagctcttccagactcctggtcacaccgaggaattagtggctgctggtaaaaccactaaaataccctgcgactctccacagtcagacccagtggacaccccaacaagcacaaagcaacgacccaagagaagtatcaggaaagcagatgtagagggagaactcttagcgtgcaggaatctaatgccatcagcaggcaaagccatgcacacgcctaaaccatcagtaggtgaagagaaagacatcatcatatttgtgggaactccagtgcagaaactggacctgacagagaacttaaccggcagcaagagacggccacaaactcctaaggaagaggcccaggctctggaagacctgactggctttaaagagctcttccagacccctggtcatactgaagaagcagtggctgctggcaaaactactaaaatgccctgcgaatcttctccaccagaatcagcagacaccccaacaagcacaagaaggcagcccaagacacctttggagaaaagggacgtacagaaggagctctcagccctgaagaagctcacacagacatcaggggaaaccacacacacagataaagtaccaggaggtgaggataaaagcatcaacgcgtttagggaaactgcaaaacagaaactggacccagcagcaagtgtaactggtagcaagaggcacccaaaaactaaggaaaaggcccaacccctagaagacctggctggcttgaaagagctcttccagacaccagtatgcactgacaagcccacgactcacgagaaaactaccaaaatagcctgcagatcacaaccagacccagtggacacaccaacaagctccaagccacagtccaagagaagtctcaggaaagtggacgtagaagaagaattcttcgcactcaggaaacgaacaccatcagcaggcaaagccatgcacacacccaaaccagcagtaagtggtgagaaaaacatctacgcatttatgggaactccagtgcagaaactggacctgacagagaacttaactggcagcaagagacggctacaaactcctaaggaaaaggcccaggctctagaagacctggctggctttaaagagctcttccagacacgaggtcacactgaggaatcaatgactaacgataaaactgccaaagtagcctgcaaatcttcacaaccagacccagacaaaaacccagcaagctccaagcgacggctcaagacatccctggggaaagtgggcgtgaaagaagagctcctagcagttggcaagctcacacagacatcaggagagactacacacacacacacagagccaacaggagatggtaagagcatgaaagcatttatggagtctccaaagcagatcttagactcagcagcaagtctaactggcagcaagaggcagctgagaactcctaagggaaagtctgaagtccctgaagacctggccggcttcatcgagctcttccagacaccaagtcacactaaggaatcaatgactaacgaaaaaactaccaaagtatcctacagagcttcacagccagacctagtggacaccccaacaagctccaagccacagcccaagagaagtctcaggaaagcagacactgaagaagaatttttagcatttaggaaacaaacgccatcagcaggcaaagccatgcacacacccaaaccagcagtaggtgaagagaaagacatcaacacgtttttgggaactccagtgcagaaactggaccagccaggaaatttacctggcagcaatagacggctacaaactcgtaaggaaaaggcccaggctctagaagaactgactggcttcagagagcttttccagacaccatgcactgataaccccacgactgatgagaaaactaccaaaaaaatactctgcaaatctccgcaatcagacccagcggacaccccaacaaacacaaagcaacggcccaagagaagcctcaagaaagcagacgtagaggaagaatttttagcattcaggaaactaacaccatcagcaggcaaagccatgcacacgcctaaagcagcagtaggtgaagagaaagacatcaacacatttgtggggactccagtggagaaactggacctgctaggaaatttacctggcagcaagagacggccacaaactcctaaagaaaaggccaaggctctagaagatctggctggcttcaaagagctcttccagacaccaggtcacactgaggaatcaatgaccgatgacaaaatcacagaagtatcctgcaaatctccacaaccagacccagtcaaaaccccaacaagctccaagcaacgactcaagatatccttggggaaagtaggtgtgaaagaagaggtcctaccagtcggcaagctcacacagacgtcagggaagaccacacagacacacagagagacagcaggagatggaaagagcatcaaagcgtttaaggaatctgcaaagcagatgctggacccagcaaactatggaactgggatggagaggtggccaagaacacctaaggaagaggcccaatcactagaagacctggccggcttcaaagagctcttccagacaccagaccacactgaggaatcaacaactgatgacaaaactaccaaaatagcctgcaaatctccaccaccagaatcaatggacactccaacaagcacaaggaggcggcccaaaacacctttggggaaaagggatatagtggaagagctctcagccctgaagcagctcacacagaccacacacacagacaaagtaccaggagatgaggataaaggcatcaacgtgttcagggaaactgcaaaacagaaactggacccagcagcaagtgtaactggtagcaagaggcagccaagaactcctaagggaaaagcccaacccctagaagacttggctggcttgaaagagctcttccagacaccaatatgcactgacaagcccacgactcatgagaaaactaccaaaatagcctgcagatctccacaaccagacccagtgggtaccccaacaatcttcaagccacagtccaagagaagtctcaggaaagcagacgtagaggaagaatccttagcactcaggaaacgaacaccatcagtagggaaagctatggacacacccaaaccagcaggaggtgatgagaaagacatgaaagcatttatgggaactccagtgcagaaattggacctgccaggaaatttacctggcagcaaaagatggccacaaactcctaaggaaaaggcccaggctctagaagacctggctggcttcaaagagctcttccagacaccaggcactgacaagcccacgactgatgagaaaactaccaaaatagcctgcaaatctccacaaccagacccagtggacaccccagcaagcacaaagcaacggcccaagagaaacctcaggaaagcagacgtagaggaagaatttttagcactcaggaaacgaacaccatcagcaggcaaagccatggacacaccaaaaccagcagtaagtgatgagaaaaatatcaacacatttgtggaaactccagtgcagaaactggacctgctaggaaatttacctggcagcaagagacagccacagactcctaaggaaaaggctgaggctctagaggacctggttggcttcaaagaactcttccagacaccaggtcacactgaggaatcaatgactgatgacaaaatcacagaagtatcctgtaaatctccacagccagagtcattcaaaacctcaagaagctccaagcaaaggctcaagatacccctggtgaaagtggacatgaaagaagagcccctagcagtcagcaagctcacacggacatcaggggagactacgcaaacacacacagagccaacaggagatagtaagagcatcaaagcgtttaaggagtctccaaagcagatcctggacccagcagcaagtgtaactggtagcaggaggcagctgagaactcgtaaggaaaaggcccgtgctctagaagacctggttgacttcaaagagctcttctcagcaccaggtcacactgaagagtcaatgactattgacaaaaacacaaaaattccctgcaaatctcccccaccagaactaacagacactgccacgagcacaaagagatgccccaagacacgtcccaggaaagaagtaaaagaggagctctcagcagttgagaggctcacgcaaacatcagggcaaagcacacacacacacaaagaaccagcaagcggtgatgagggcatcaaagtattgaagcaacgtgcaaagaagaaaccaaacccagtagaagaggaacccagcaggagaaggccaagagcacctaaggaaaaggcccaacccctggaagacctggccggcttcacagagctctctgaaacatcaggtcacactcaggaatcactgactgctggcaaagccactaaaataccctgcgaatctcccccactagaagtggtagacaccacagcaagcacaaagaggcatctcaggacacgtgtgcagaaggtacaagtaaaagaagagccttcagcagtcaagttcacacaaacatcaggggaaaccacggatgcagacaaagaaccagcaggtgaagataaaggcatcaaagcattgaaggaatctgcaaaacagacaccggctccagcagcaagtgtaactggcagcaggagacggccaagagcacccagggaaagtgcccaagccatagaagacctagctggcttcaaagacccagcagcaggtcacactgaagaatcaatgactgatgacaaaaccactaaaataccctgcaaatcatcaccagaactagaagacaccgcaacaagctcaaagagacggcccaggacacgtgcccagaaagtagaagtgaaggaggagctgttagcagttggcaagctcacacaaacctcaggggagaccacgcacaccgacaaagagccggtaggtgagggcaaaggcacgaaagcatttaagcaacctgcaaagcggaagctggacgcagaagatgtaattggcagcaggagacagccaagagcacctaaggaaaaggcccaacccctggaagatctggccagcttccaagagctctctcaaacaccaggccacactgaggaactggcaaatggtgctgctgatagctttacaagcgctccaaagcaaacacctgacagtggaaaacctctaaaaatatccagaagagttcttcgggcccctaaagtagaacccgtgggagacgtggtaagcaccagagaccctgtaaaatcacaaagcaaaagcaacacttccctgcccccactgcccttcaagaggggaggtggcaaagatggaagcgtcacgggaaccaagaggctgcgctgcatgccagcaccagaggaaattgtggaggagctgccagccagcaagaagcagagggttgctcccagggcaagaggcaaatcatccgaacccgtggtcatcatgaagagaagtttgaggacttctgcaaaaagaattgaacctgcggaagagctgaacagcaacgacatgaaaaccaacaaagaggaacacaaattacaagactcggtccctgaaaataagggaatatccctgcgctccagacgccaaaataagactgaggcagaacagcaaataactgaggtctttgtattagcagaaagaatagaaataaacagaaatgaaaagaagcccatgaagacctccccagagatggacattcagaatccagatgatggagcccggaaacccatacctagagacaaagtcactgagaacaaaaggtgcttgaggtctgctagacagaatgagagctcccagcctaaggtggcagaggagagcggagggcagaagagtgcgaaggttctcatgcagaatcagaaagggaaaggagaagcaggaaattcagactccatgtgcctgagatcaagaaagacaaaaagccagcctgcagcaagcactttggagagcaaatctgtgcagagagtaacgcggagtgtcaagaggtgtgcagaaaatccaaagaaggctgaggacaatgtgtgtgtcaagaaaataagaaccagaagtcatagggacagtgaagatatttgacagaaaaatcgaactgggaaaaatataataaagttagttttgtgataagttctagtgcagtttttgtcataaattacaagtgaattctgtaagtaaggctgtcagtctgcttaagggaagaaaactttggatttgctgggtctgaatcggcttcataaactccactgggagcactgctgggctcctggactgagaatagttgaacaccgggggctttgtgaaggagtctgggccaaggtttgccctcagctttgcagaatgaagccttgaggtctgtcaccacccacagccaccctacagcagccttaactgtgacacttgccacactgtgtcgtcgtttgtttgcctatgtcctccagggcacggtggcaggaacaactatcctcgtctgtcccaacactgagcaggcactcggtaaacacgaatgaatggatgagcgcacggatgaatggagcttacaagatctgtctttccaatggccgggggcatttggtccccaaattaaggctattggacatctgcacaggacagtcctatttttgatgtcctttcctttctgaaaataaagttttgtgctttggagaatgactcgtgagcacatctttagggaccaagagtgactttctgtaaggagtgactcgtggcttgccttggtctcttgggaatacttttctaactagggttgctctcacctgagacattctccacccgcggaatctcagggtcccaggctgtgggccatcacgacctcaaactggctcctaatctccagctttcctgtcattgaaagcttcggaagtttactggctctgctcccgcctgttttctttctgactctatctggcagcccgatgccacccagtacaggaagtgacaccagtactctgtaaagcatcatcatccttggagagactgagcactcagcaccttcagccacgatttcaggatcgcttccttgtgagccgctgcctccgaaatctcctttgaagcccagacatctttctccagcttcagacttgtagatataactcgttcatcttcatttactttccactttgccccctgtcctctctgtgttccccaaatcagagaatagcccgccatcccccaggtcacctgtctggattcctccccattcacccaccttgccaggtgcaggtgaggatggtgcaccagacagggtagctgtcccccaaaatgtgccctgtgcgggcagtgccctgtctccacgtttgtttccccagtgtctggcggggagccaggtgacatcataaatacttgctgaatgaatgcagaaatcagcggtactgacttgtactatattggctgccatgatagggttctcacagcgtcatccatgatcgtaagggagaatgacattctgcttgagggagggaatagaaaggggcagggaggggacatctgagggcttcacagggctgcaaagggtacagggattgcaccagggcagaacaggggagggtgttcaaggaagagtggctcttagcagaggcactttggaaggtgtgaggcataaatgcttccttctacgtaggccaacctcaaaactttcagtaggaatgttgctatgatcaagttgttctaacactttagacttagtagtaattatgaacctcacatagaaaaatttcatccagccatatgcctgtggagtggaatattctgtttagtagaaaaatcctttagagttcagctctaaccagaaatcttgctgaagtatgtcagcaccttttctcaccctggtaagtacagtatttcaagagcacgctaagggtggttttcattttacagggctgttgatgatgggttaaaaatgttcatttaagggctacccccgtgtttaatagatgaacaccacttctacacaaccctccttggtactgggggagggagagatctgacaaatactgcccattcccctaggctgactggatttgagaacaaatacccacccatttccaccatggtatggtaacttctctgagcttcagtttccaagtgaatttccatgtaataggacattcccattaaatacaagctgtttttactttttcgcctcccagggcctgtgggatctggtcccccagcctctcttgggctttcttacactaactctgtacctaccatctcctgcctcccttaggcaggcacctccaaccaccacacactccctgctgttttccctgcctggaactttccctcctgccccaccaagatcatttcatccagtcctgagctcagcttaagggaggcttcttgcctgtgggttccctcacccccatgcctgtcctccaggctggggcaggttcttagtttgcctggaattgttctgtacctctttgtagcacgtagtgttgtggaaactaagccactaattgagtttctggctcccctcctggggttgtaagttttgttcattcatgagggccgactgcatttcctggttactctatcccagtgaccagccacaggagatgtccaataaagtatgtgatgaaatggtcttaaaaaaaaaaaaaa

SEQ ID NO: 40 - DNA, 2662 bp, Escherichia coli
  gene (1)..(2662): Accession No. NM_000249
gaagagacccagcaacccacagagttgagaaatttgactggcattcaagctgtccaatcaatagctgccgctgaagggtggggctggatggcgtaagctacagctgaaggaagaacgtgagcacgaggcactgaggtgattggctgaaggcacttccgttgagcatctagacgtttccttggctcttctggcgccaaaatgtcgttcgtggcaggggttattcggcggctggacgagacagtggtgaaccgcatcgcggcgggggaagttatccagcggccagctaatgctatcaaagagatgattgagaactgtttagatgcaaaatccacaagtattcaagtgattgttaaagagggaggcctgaagttgattcagatccaagacaatggcaccgggatcaggaaagaagatctggatattgtatgtgaaaggttcactactagtaaactgcagtcctttgaggatttagccagtatttctacctatggctttcgaggtgaggctttggccagcataagccatgtggctcatgttactattacaacgaaaacagctgatggaaagtgtgcatacagagcaagttactcagatggaaaactgaaagcccctcctaaaccatgtgctggcaatcaagggacccagatcacggtggaggaccttttttacaacatagccacgaggagaaaagctttaaaaaatccaagtgaagaatatgggaaaattttggaagttgttggcaggtattcagtacacaatgcaggcattagtttctcagttaaaaaacaaggagagacagtagctgatgttaggacactacccaatgcctcaaccgtggacaatattcgctccatctttggaaatgctgttagtcgagaactgatagaaattggatgtgaggataaaaccctagccttcaaaatgaatggttacatatccaatgcaaactactcagtgaagaagtgcatcttcttactcttcatcaaccatcgtctggtagaatcaacttccttgagaaaagccatagaaacagtgtatgcagcctatttgcccaaaaacacacacccattcctgtacctcagtttagaaatcagtccccagaatgtggatgttaatgtgcaccccacaaagcatgaagttcacttcctgcacgaggagagcatcctggagcgggtgcagcagcacatcgagagcaagctcctgggctccaattcctccaggatgtacttcacccagactttgctaccaggacttgctggcccctctggggagatggttaaatccacaacaagtctgacctcgtcttctacttctggaagtagtgataaggtctatgcccaccagatggttcgtacagattcccgggaacagaagcttgatgcatttctgcagcctctgagcaaacccctgtccagtcagccccaggccattgtcacagaggataagacagatatttctagtggcagggctaggcagcaagatgaggagatgcttgaactcccagcccctgctgaagtggctgccaaaaatcagagcttggagggggatacaacaaaggggacttcagaaatgtcagagaagagaggacctacttccagcaaccccagaaagagacatcgggaagattctgatgtggaaatggtggaagatgattcccgaaaggaaatgactgcagcttgtaccccccggagaaggatcattaacctcactagtgttttgagtctccaggaagaaattaatgagcagggacatgaggttctccgggagatgttgcataaccactccttcgtgggctgtgtgaatcctcagtgggccttggcacagcatcaaaccaagttataccttctcaacaccaccaagcttagtgaagaactgttctaccagatactcatttatgattttgccaattttggtgttctcaggttatcggagccagcaccgctctttgaccttgccatgcttgccttagatagtccagagagtggctggacagaggaagatggtcccaaagaaggacttgctgaatacattgttgagtttctgaagaagaaggctgagatgcttgcagactatttctctttggaaattgatgaggaagggaacctgattggattaccccttctgattgacaactatgtgccccctttggagggactgcctatcttcattcttcgactagccactgaggtgaattgggacgaagaaaaggaatgttttgaaagcctcagtaaagaatgcgctatgttctattccatccggaagcagtacatatctgaggagtcgaccctctcaggccagcagagtgaagtgcctggctccattccaaactcctggaagtggactgtggaacacattgtctataaagccttgcgctcacacattctgcctcctaaacatttcacagaagatggaaatatcctgcagcttgctaacctgcctgatctatacaaagtctttgagaggtgttaaatatggttatttatgcactgtgggatgtgttcttctttctctgtattccgatacaaagtgttgtatcaaagtgtgatatacaaagtgtaccaacataagtgttggtagcacttaagacttatacttgccttctgatagtattcctttatacacagtggattgattataaataaatagatgtgtcttaacataa

SEQ ID NO: 41 - DNA, 5643 bp, Homo sapiens
  gene (1)..(5643): Accession No. NM_000902
gagagcgccgagacgcgcggggcgcggagatgtgcaagtggcgaagcttgaccgagagcaggctggagcagccgcccaactcctggcgcgggatctgctgaggggtcacgattttaggtgatgggcaagtcagaaagtcagatggatataactgatatcaacactccaaagccaaagaagaaacagcgatggactccactggagatcagcctctcggtccttgtcctgctcctcaccatcatagctgtgacaatgatcgcactctatgcaacctacgatgatggtatttgcaagtcatcagactgcataaaatcagctgctcgactgatccaaaacatggatgccaccactgagccttgtacagactttttcaaatatgcttgcggaggctggttgaaacgtaatgtcattcccgagaccagctcccgttacggcaactttgacattttaagagatgaactagaagtcgttttgaaagatgtccttcaagaacccaaaactgaagatatagtagcagtgcagaaagcaaaagcattgtacaggtcttgtataaatgaatctgctattgatagcagaggtggagaacctctactcaaactgttaccagacatatatgggtggccagtagcaacagaaaactgggagcaaaaatatggtgcttcttggacagctgaaaaagctattgcacaactgaattctaaatatgggaaaaaagtccttattaatttgtttgttggcactgatgataagaattctgtgaatcatgtaattcatattgaccaacctcgacttggcctcccttctagagattactatgaatgcactggaatctataaagaggcttgtacagcatatgtggattttatgatttctgtggccagattgattcgtcaggaagaaagattgcccatcgatgaaaaccagcttgctttggaaatgaataaagttatggaattggaaaaagaaattgccaatgctacggctaaacctgaagatcgaaatgatccaatgcttctgtataacaagatgacattggcccagatccaaaataacttttcactagagatcaatgggaagccattcagctggttgaatttcacaaatgaaatcatgtcaactgtgaatattagtattacaaatgaggaagatgtggttgtttatgctccagaatatttaaccaaacttaagcccattcttaccaaatattctgccagagatcttcaaaatttaatgtcctggagattcataatggatcttgtaagcagcctcagccgaacctacaaggagtccagaaatgctttccgcaaggccctttatggtacaacctcagaaacagcaacttggagacgttgtgcaaactatgtcaatgggaatatggaaaatgctgtggggaggctttatgtggaagcagcatttgctggagagagtaaacatgtggtcgaggatttgattgcacagatccgagaagtttttattcagactttagatgacctcacttggatggatgccgagacaaaaaagagagctgaagaaaaggccttagcaattaaagaaaggatcggctatcctgatgacattgtttcaaatgataacaaactgaataatgagtacctcgagttgaactacaaagaagatgaatacttcgagaacataattcaaaatttgaaattcagccaaagtaaacaactgaagaagctccgagaaaaggtggacaaagatgagtggataagtggagcagctgtagtcaatgcattttactcttcaggaagaaatcagatagtcttcccagccggcattctgcagccccccttctttagtgcccagcagtccaactcattgaactatgggggcatcggcatggtcataggacacgaaatcacccatggcttcgatgacaatggcagaaactttaacaaagatggagacctcgttgactggtggactcaacagtctgcaagtaactttaaggagcaatcccagtgcatggtgtatcagtatggaaacttttcctgggacctggcaggtggacagcaccttaatggaattaatacactgggagaaaacattgctgataatggaggtcttggtcaagcatacagagcctatcagaattatattaaaaagaatggcgaagaaaaattacttcctggacttgacctaaatcacaaacaactatttttcttgaactttgcacaggtgtggtgtggaacctataggccagagtatgcggttaactccattaaaacagatgtgcacagtccaggcaatttcaggattattgggactttgcagaactctgcagagttttcagaagcctttcactgccgcaagaattcatacatgaatccagaaaagaagtgccgggtttggtgatcttcaaaagaagcattgcagcccttggctagacttgccaacaccacagaaatggggaattctctaatcgaaagaaaatgggccctaggggtcactgtactgacttgagggtgattaacagagagggcaccatcacaatacagataacattaggttgtcctagaaagggtgtggagggaggaagggggtctaaggtctatcaagtcaatcatttctcactgtgtacataatgcttaatttctaaagataatattactgtttatttctgtttctcatatggtctaccagtttgctgatgtccctagaaaacaatgcaaaacctttgaggtagaccaggatttctaatcaaaagggaaaagaagatgttgaagaatacagttaggcaccagaagaacagtaggtgacactatagtttaaaacacattgcctaactactagtttttacttttatttgcaacatttacagtccttcaaaatccttccaaagaattcttatacacattggggccttggagcttacatagttttaaactcatttttgccatacatcagttattcattctgtgatcatttattttaagcactcttaaagcaaaaaatgaatgtctaaaattgttttttgttgtacctgctttgactgatgctgagattcttcaggcttcctgcaattttctaagcaatttcttgctctatctctcaaaacttggtatttttcagagatttatataaatgtaaaaataataatttttatatttaattattaactacatttatgagtaactattattataggtaatcaatgaatattgaagtttcagcttaaaataaacagttgtgaaccaagatctataaagcgatatacagatgaaaatttgagactatttaaacttataaatcatattgatgaaaagatttaagcacaaactttagggtaaaaattgccattggacagttgtctagagatatatatacttgtggttttcaaattggactttcaaaattaaatctgtccctgagagtgtctctgataaaagggcaaatctgcacctatgtagctctgcatctcctgtcttttcaggtttgtcatcagatggaaatattttgataataaattgaaattgtgaactcattgctccctaagactgtgacaactgtctaactttagaagtgcatttctgaatagaaatgggaggcctctgatggaccttctagaattataagtcacaaagagttctggaaaagaactgtttactgcttgataggaattcatcttttgaggcttctgttcctctcttttcctgttgtattgactattttcgttcattacttgattaagattttacaaaagaggagcacttccaaaattcttatttttcctaacaaaagatgaaagcagggaatttctatctaaatgatgagtattagttccctgtctcttgaaaaatgcccatttgcctttaaaaaaaaaagttacagaaatactataacatatgtacataaattgcataaagcataagtatacagttcaataaacttaactttaactgaacaatggccctgtagccagcacctgtaagaaacagagcagtaccagcgctctaaaagcacctccttgtcactttattactcccagaacaacaactatcctgacttctaatatcattcactagctttgcctggttttgtcttttatgcagatagaatcaatcagtatgtattcttttgtgcctggcttctttctctcagccttacatttgtgagattcctctgtattgtgctgattgtggatcttttcattctcattgcagaataatgttctattgtgggacttattacaatttgttcatcctattgttgatgggcacttgagaactttccattttggcgctattacaaatagtgcaactatgaatgtactgcatgttaccatcttacttgagcctttaatggacttatttcttcaaatccttccaaaaattattataagcattgaaattatagtttcaagccaactgtggatacccttaccctttcctcctttatcacaaccaccgttacaagtatacttatatttccctaaaatacatttaaaacttacctaagtgacatttgtagttggagtaataggagcttccagctctaataaaacagctgtctctaacttattttatttccatcatgtcagagcaggtgaagagccagaagtgaagagtgactagtacaaattataaaaagccactagactcttcactgttagctttttaaaacattaggctcccatccctatggaggaacaactctccagtgcctggatcccctctgtctacaaatataagattttctgggcctaaaggatagatcaaagtcaaaaatagcaatgcctccctatccctcacacatccagacatcatgaattttacatggtactcttgttgagttctgtagagccttctgatgtctctaaagcactaccgattctttggagttgtcacatcagataagacatatctctaattccatccataaatccagttctactatggctgagttctggtcaaagaaagaaagtttagaagctgagacacaaagggttgggagctgatgaaactcacaaatgatggtaggaagaagctctcgacaatacccgttggcaaggagtctgcctccatgctgcagtgttcgagtggattgtaggtgcaagatggaaaggattgtaggtgcaagctgtccagagaaaagagtccttgttccagccctattctgccactcctgacagggtgaccttgggtatttgcaatattcctttgggcctctgcttctctcacctaaaaaaagagaattagattatattggtggttctcagcaagagaaggagtatgtgtccaatgctgccttcccatgaatctgtctcccagttatgaatcagtgggcaggataaactgaaaactcccatttacgtgtctgaatcgagtgagacaaaattttagtccaaataacaagtaccaaagttttatcaagtttgggtctgtgctgctgttactgttaaccatttaagtggggcaaaaccttgctaattttctcaaaagcatttatcattcttgttgccacagctggagctctcaaactaaaagacatttgttattttggaaagaagaaagactctattctcaaagtttcctaatcagaaatttttatcagtttccagtctcaaaaatacaaaataaaaacaaacgtttttaatactattgcttttatgcctagtcaactctg

SEQ ID NO: 42 - DNA, 3145 bp, Escherichia coli
  gene (1)..(3145): Accession No. NM_000251
ggcgggaaacagcttagtgggtgtggggtcgcgcattttcttcaaccaggaggtgaggaggtttcgacatggcggtgcagccgaaggagacgctgcagttggagagcgcggccgaggtcggcttcgtgcgcttctttcagggcatgccggagaagccgaccaccacagtgcgccttttcgaccggggcgacttctatacggcgcacggcgaggacgcgctgctggccgcccgggaggtgttcaagacccagggggtgatcaagtacatggggccggcaggagcaaagaatctgcagagtgttgtgcttagtaaaatgaattttgaatcttttgtaaaagatcttcttctggttcgtcagtatagagttgaagtttataagaatagagctggaaataaggcatccaaggagaatgattggtatttggcatataaggcttctcctggcaatctctctcagtttgaagacattctctttggtaacaatgatatgtcagcttccattggtgttgtgggtgttaaaatgtccgcagttgatggccagagacaggttggagttgggtatgtggattccatacagaggaaactaggactgtgtgaattccctgataatgatcagttctccaatcttgaggctctcctcatccagattggaccaaaggaatgtgttttacccggaggagagactgctggagacatggggaaactgagacagataattcaaagaggaggaattctgatcacagaaagaaaaaaagctgacttttccacaaaagacatttatcaggacctcaaccggttgttgaaaggcaaaaagggagagcagatgaatagtgctgtattgccagaaatggagaatcaggttgcagtttcatcactgtctgcggtaatcaagtttttagaactcttatcagatgattccaactttggacagtttgaactgactacttttgacttcagccagtatatgaaattggatattgcagcagtcagagcccttaacctttttcagggttctgttgaagataccactggctctcagtctctggctgccttgctgaataagtgtaaaacccctcaaggacaaagacttgttaaccagtggattaagcagcctctcatggataagaacagaatagaggagagattgaatttagtggaagcttttgtagaagatgcagaattgaggcagactttacaagaagatttacttcgtcgattcccagatcttaaccgacttgccaagaagtttcaaagacaagcagcaaacttacaagattgttaccgactctatcagggtataaatcaactacctaatgttatacaggctctggaaaaacatgaaggaaaacaccagaaattattgttggcagtttttgtgactcctcttactgatcttcgttctgacttctccaagtttcaggaaatgatagaaacaactttagatatggatcaggtggaaaaccatgaattccttgtaaaaccttcatttgatcctaatctcagtgaattaagagaaataatgaatgacttggaaaagaagatgcagtcaacattaataagtgcagccagagatcttggcttggaccctggcaaacagattaaactggattccagtgcacagtttggatattactttcgtgtaacctgtaaggaagaaaaagtccttcgtaacaataaaaactttagtactgtagatatccagaagaatggtgttaaatttaccaacagcaaattgacttctttaaatgaagagtataccaaaaataaaacagaatatgaagaagcccaggatgccattgttaaagaaattgtcaatatttcttcaggctatgtagaaccaatgcagacactcaatgatgtgttagctcagctagatgctgttgtcagctttgctcacgtgtcaaatggagcacctgttccatatgtacgaccagccattttggagaaaggacaaggaagaattatattaaaagcatccaggcatgcttgtgttgaagttcaagatgaaattgcatttattcctaatgacgtatactttgaaaaagataaacagatgttccacatcattactggccccaatatgggaggtaaatcaacatatattcgacaaactggggtgatagtactcatggcccaaattgggtgttttgtgccatgtgagtcagcagaagtgtccattgtggactgcatcttagcccgagtaggggctggtgacagtcaattgaaaggagtctccacgttcatggctgaaatgttggaaactgcttctatcctcaggtctgcaaccaaagattcattaataatcatagatgaattgggaagaggaacttctacctacgatggatttgggttagcatgggctatatcagaatacattgcaacaaagattggtgctttttgcatgtttgcaacccattttcatgaacttactgccttggccaatcagataccaactgttaataatctacatgtcacagcactcaccactgaagagaccttaactatgctttatcaggtgaagaaaggtgtctgtgatcaaagttttgggattcatgttgcagagcttgctaatttccctaagcatgtaatagagtgtgctaaacagaaagccctggaacttgaggagtttcagtatattggagaatcgcaaggatatgatatcatggaaccagcagcaaagaagtgctatctggaaagagagcaaggtgaaaaaattattcaggagttcctgtccaaggtgaaacaaatgccctttactgaaatgtcagaagaaaacatcacaataaagttaaaacagctaaaagctgaagtaatagcaaagaataatagctttgtaaatgaaatcatttcacgaataaaagttactacgtgaaaaatcccagtaatggaatgaaggtaatattgataagctattgtctgtaatagttttatattgttttatattaaccctttttccatagtgttaactgtcagtgcccatgggctatcaacttaataagatatttagtaatattttactttgaggacattttcaaagatttttattttgaaaaatgagagctgtaactgaggactgtttgcaattgacataggcaataataagtgatgtgctgaattttataaataaaatcatgtagtttgtgg

SEQ ID NO: 43 - DNA, 4435 bp, Escherichia coli
  gene (1)..(4435): Accession No. NM_000179
ggcgaggcgcctgttgattggccactggggcccgggttcctccggcggagcgcgcctccccccagatttcccgccagcaggagccgcgcggtagatgcggtgcttttaggagctccgtccgacagaacggttgggccttgccggctgtcggtatgtcgcgacagagcaccctgtacagcttcttccccaagtctccggcgctgagtgatgccaacaaggcctcggccagggcctcacgcgaaggcggccgtgccgccgctgcccccggggcctctccttccccaggcggggatgcggcctggagcgaggctgggcctgggcccaggcccttggcgcgctccgcgtcaccgcccaaggcgaagaacctcaacggagggctgcggagatcggtagcgcctgctgcccccaccagttgtgacttctcaccaggagatttggtttgggccaagatggagggttacccctggtggccttgtctggtttacaaccacccctttgatggaacattcatccgcgagaaagggaaatcagtccgtgttcatgtacagttttttgatgacagcccaacaaggggctgggttagcaaaaggcttttaaagccatatacaggttcaaaatcaaaggaagcccagaagggaggtcatttttacagtgcaaagcctgaaatactgagagcaatgcaacgtgcagatgaagccttaaataaagacaagattaagaggcttgaattggcagtttgtgatgagccctcagagccagaagaggaagaagagatggaggtaggcacaacttacgtaacagataagagtgaagaagataatgaaattgagagtgaagaggaagtacagcctaagacacaaggatctaggcgaagtagccgccaaataaaaaaacgaagggtcatatcagattctgagagtgacattggtggctctgatgtggaatttaagccagacactaaggaggaaggaagcagtgatgaaataagcagtggagtgggggatagtgagagtgaaggcctgaacagccctgtcaaagttgctcgaaagcggaagagaatggtgactggaaatggctctcttaaaaggaaaagctctaggaaggaaacgccctcagccaccaaacaagcaactagcatttcatcagaaaccaagaatactttgagagctttctctgcccctcaaaattctgaatcccaagcccacgttagtggaggtggtgatgacagtagtcgccctactgtttggtatcatgaaactttagaatggcttaaggaggaaaagagaagagatgagcacaggaggaggcctgatcaccccgattttgatgcatctacactctatgtgcctgaggatttcctcaattcttgtactcctgggatgaggaagtggtggcagattaagtctcagaactttgatcttgtcatctgttacaaggtggggaaattttatgagctgtaccacatggatgctcttattggagtcagtgaactggggctggtattcatgaaaggcaactgggcccattctggctttcctgaaattgcatttggccgttattcagattccctggtgcagaagggctataaagtagcacgagtggaacagactgagactccagaaatgatggaggcacgatgtagaaagatggcacatatatccaagtatgatagagtggtgaggagggagatctgtaggatcattaccaagggtacacagacttacagtgtgctggaaggtgatccctctgagaactacagtaagtatcttcttagcctcaaagaaaaagaggaagattcttctggccatactcgtgcatatggtgtgtgctttgttgatacttcactgggaaagtttttcataggtcagttttcagatgatcgccattgttcgagatttaggactctagtggcacactatcccccagtacaagttttatttgaaaaaggaaatctctcaaaggaaactaaaacaattctaaagagttcattgtcctgttctcttcaggaaggtctgatacccggctcccagttttgggatgcatccaaaactttgagaactctccttgaggaagaatattttagggaaaagctaagtgatggcattggggtgatgttaccccaggtgcttaaaggtatgacttcagagtctgattccattgggttgacaccaggagagaaaagtgaattggccctctctgctctaggtggttgtgtcttctacctcaaaaaatgccttattgatcaggagcttttatcaatggctaattttgaagaatatattcccttggattctgacacagtcagcactacaagatctggtgctatcttcaccaaagcctatcaacgaatggtgctagatgcagtgacattaaacaacttggagatttttctgaatggaacaaatggttctactgaaggaaccctactagagagggttgatacttgccatactccttttggtaagcggctcctaaagcaatggctttgtgccccactctgtaaccattatgctattaatgatcgtctagatgccatagaagacctcatggttgtgcctgacaaaatctccgaagttgtagagcttctaaagaagcttccagatcttgagaggctactcagtaaaattcataatgttgggtctcccctgaagagtcagaaccacccagacagcagggctataatgtatgaagaaactacatacagcaagaagaagattattgattttctttctgctctggaaggattcaaagtaatgtgtaaaattatagggatcatggaagaagttgctgatggttttaagtctaaaatccttaagcaggtcatctctctgcagacaaaaaatcctgaaggtcgttttcctgatttgactgtagaattgaaccgatgggatacagcctttgaccatgaaaaggctcgaaagactggacttattactcccaaagcaggctttgactctgattatgaccaagctcttgctgacataagagaaaatgaacagagcctcctggaatacctagagaaacagcgcaacagaattggctgtaggaccatagtctattgggggattggtaggaaccgttaccagctggaaattcctgagaatttcaccactcgcaatttgccagaagaatacgagttgaaatctaccaagaagggctgtaaacgatactggaccaaaactattgaaaagaagttggctaatctcataaatgctgaagaacggagggatgtatcattgaaggactgcatgcggcgactgttctataactttgataaaaattacaaggactggcagtctgctgtagagtgtatcgcagtgttggatgttttactgtgcctggctaactatagtcgagggggtgatggtcctatgtgtcgcccagtaattctgttgccggaagataccccccccttcttagagcttaaaggatcacgccatccttgcattacgaagactttttttggagatgattttattcctaatgacattctaataggctgtgaggaagaggagcaggaaaatggcaaagcctattgtgtgcttgttactggaccaaatatggggggcaagtctacgcttatgagacaggctggcttattagctgtaatggcccagatgggttgttacgtccctgctgaagtgtgcaggctcacaccaattgatagagtgtttactagacttggtgcctcagacagaataatgtcaggtgaaagtacattttttgttgaattaagtgaaactgccagcatactcatgcatgcaacagcacattctctggtgcttgtggatgaattaggaagaggtactgcaacatttgatgggacggcaatagcaaatgcagttgttaaagaacttgctgagactataaaatgtcgtacattattttcaactcactaccattcattagtagaagattattctcaaaatgttgctgtgcgcctaggacatatggcatgcatggtagaaaatgaatgtgaagaccccagccaggagactattacgttcctctataaattcattaagggagcttgtcctaaaagctatggctttaatgcagcaaggcttgctaatctcccagaggaagttattcaaaagggacatagaaaagcaagagaatttgagaagatgaatcagtcactacgattatttcgggaagtttgcctggctagtgaaaggtcaactgtagatgctgaagctgtccataaattgctgactttgattaaggaattatagactgactacattggaagctttgagttgacttctgacaaaggtggtaaattcagacaacattatgatctaataaactttattttttaaaaatgaaaaaaaaaaaaaaaaaaaaaaaaaaaaaaaaaaaaaaaaaaaaaaaaaaaaaaaaaaaaaaaaaaaaaaaaaaaaaaaaaaaaaaaaaaaaaaaaaaaaaaaaaaaa

SEQ ID NO: 44 - DNA, 1936 bp, Escherichia coli
  gene (1)..(1936): Accession No. NM_012222
cagccggagccgcggtgtacaacggaacttgtagtctcctcgtggctagttcaggcggaaggagcagtcctctgaagcttgaggagcctctagaactatgagcccgaggccttcccctctcccagagcgcagaggctttgaaggctacctctgggaagccgctcaccgtcggaagctgcgggagctgaaactgcgccatcgtcactgtcggcggccatgacaccgctcgtctcccgcctgagtcgtctgtgggccatcatgaggaagccacgagcagccgtgggaagtggtcacaggaagcaggcagccagccaggaagggaggcagaagcatgctaagaacaacagtcaggccaagccttctgcctgtgatgggatgattgctgagtgtcctggggccccagcaggcctggccaggcagccggaagaggtggtattgcaggcctctgtctcctcataccatctattcagagacgtagctgaagtcacagccttccgagggagcctgctaagctggtacgaccaagagaaacgggacctaccatggagaagacgggcagaagatgagatggacctggacaggcgggcatatgctgtgtgggtctcagaggtcatgctgcagcagacccaggttgccactgtgatcaactactataccggatggatgcagaagtggcctacactgcaggacctggccagtgcttccctggaggaggtgaatcaactctgggctggcctgggctactattctcgtggccggcggctgcaggagggagctcggaaggtggtagaggagctagggggccacatgccacgtacagcagagaccctgcagcagctcctgcctggcgtggggcgctacacagctggggccattgcctctatcgcctttggccaggcaaccggtgtggtggatggcaacgtagcacgggtgctgtgccgtgtccgagccattggtgctgatcccagcagcacccttgtttcccagcagctctggggtctagcccagcagctggtggacccagcccggccaggagatttcaaccaagcagccatggagctaggggccacagtgtgtaccccacagcgcccactgtgcagccagtgccctgtggagagcctgtgccgggcacgccagagagtggagcaggaacagctcttagcctcagggagcctgtcgggcagtcctgacgtggaggagtgtgctcccaacactggacagtgccacctgtgcctgcctccctcggagccctgggaccagaccctgggagtggtcaacttccccagaaaggccagccgcaagccccccagggaggagagctctgccacctgtgttctggaacagcctggggcccttggggcccaaattctgctggtgcagaggcccaactcaggtctgctggcaggactgtgggagttcccgtccgtgacctgggagccctcagagcagcttcagcgcaaggccctgctgcaggaactacagcgttgggctgggcccctcccagccacgcacctccggcaccttggggaggttgtccacaccttctctcacatcaagctgacatatcaagtatatgggctggccttggaagggcagaccccagtgaccaccgtaccaccaggtgctcgctggctgacgcaggaggaatttcacaccgcagctgtttccaccgccatgaaaaaggttttccgtgtgtatcagggccaacagccagggacctgtatgggttccaaaaggtcccaggtgtcctctccgtgcagtcggaaaaagccccgcatgggccagcaagtcctggataatttctttcggtctcacatctccactgatgcacacagcctcaacagtgcagcccagtgacacctctgaaagcccccattccctgagaatcctgttgttagtaaagtgcttatttttgtagttaaaaaaaaaaaaaaaa

SEQ ID NO: 45 - DNA, 2379 bp, Homo sapiens
  gene (1)..(2379): Accession No. NM_002467
gacccccgagctgtgctgctcgcggccgccaccgccgggccccggccgtccctggctcccctcctgcctcgagaagggcagggcttctcagaggcttggcgggaaaaagaacggagggagggatcgcgctgagtataaaagccggttttcggggctttatctaactcgctgtagtaattccagcgagaggcagagggagcgagcgggcggccggctagggtggaagagccgggcgagcagagctgcgctgcgggcgtcctgggaagggagatccggagcgaatagggggcttcgcctctggcccagccctcccgctgatcccccagccagcggtccgcaacccttgccgcatccacgaaactttgcccatagcagcgggcgggcactttgcactggaacttacaacacccgagcaaggacgcgactctcccgacgcggggaggctattctgcccatttggggacacttccccgccgctgccaggacccgcttctctgaaaggctctccttgcagctgcttagacgctggatttttttcgggtagtggaaaaccagcagcctcccgcgacgatgcccctcaacgttagcttcaccaacaggaactatgacctcgactacgactcggtgcagccgtatttctactgcgacgaggaggagaacttctaccagcagcagcagcagagcgagctgcagcccccggcgcccagcgaggatatctggaagaaattcgagctgctgcccaccccgcccctgtcccctagccgccgctccgggctctgctcgccctcctacgttgcggtcacacccttctcccttcggggagacaacgacggcggtggcgggagcttctccacggccgaccagctggagatggtgaccgagctgctgggaggagacatggtgaaccagagtttcatctgcgacccggacgacgagaccttcatcaaaaacatcatcatccaggactgtatgtggagcggcttctcggccgccgccaagctcgtctcagagaagctggcctcctaccaggctgcgcgcaaagacagcggcagcccgaaccccgcccgcggccacagcgtctgctccacctccagcttgtacctgcaggatctgagcgccgccgcctcagagtgcatcgacccctcggtggtcttcccctaccctctcaacgacagcagctcgcccaagtcctgcgcctcgcaagactccagcgccttctctccgtcctcggattctctgctctcctcgacggagtcctccccgcagggcagccccgagcccctggtgctccatgaggagacaccgcccaccaccagcagcgactctgaggaggaacaagaagatgaggaagaaatcgatgttgtttctgtggaaaagaggcaggctcctggcaaaaggtcagagtctggatcaccttctgctggaggccacagcaaacctcctcacagcccactggtcctcaagaggtgccacgtctccacacatcagcacaactacgcagcgcctccctccactcggaaggactatcctgctgccaagagggtcaagttggacagtgtcagagtcctgagacagatcagcaacaaccgaaaatgcaccagccccaggtcctcggacaccgaggagaatgtcaagaggcgaacacacaacgtcttggagcgccagaggaggaacgagctaaaacggagcttttttgccctgcgtgaccagatcccggagttggaaaacaatgaaaaggcccccaaggtagttatccttaaaaaagccacagcatacatcctgtccgtccaagcagaggagcaaaagctcatttctgaagaggacttgttgcggaaacgacgagaacagttgaaacacaaacttgaacagctacggaactcttgtgcgtaaggaaaagtaaggaaaacgattccttctaacagaaatgtcctgagcaatcacctatgaacttgtttcaaatgcatgatcaaatgcaacctcacaaccttggctgagtcttgagactgaaagatttagccataatgtaaactgcctcaaattggactttgggcataaaagaacttttttatgcttaccatcttttttttttctttaacagatttgtatttaagaattgtttttaaaaaattttaagatttacacaatgtttctctgtaaatattgccattaaatgtaaataactttaataaaacgtttatagcagttacacagaatttcaatcctagtatatagtacctagtattataggtactataaaccctaattttttttatttaagtacattttgctttttaaagttgatttttttctattgtttttagaaaaaataaaataactggcaaatatatcattgagccaaatcttaaaaaaaaaaaaaaa

SEQ ID NO: 46 - DNA, 4093 bp, Homo sapiens
  gene (1)..(4093): Accession No. NM_003998
gtgagagagtgagcgagacagaaagagagagaagtgcaccagcgagccggggcaggaagaggaggtttcgccaccggagcggcccggcgacgcgctgacagcttcccctgcccttcccgtcggtcgggccgccagccgccgcagccctcggcctgcacgcagccaccggccccgctcccggagcccagcgccgccgaggccgcagccgcccggccagtaaggcggcgccgccgcccggccaccgcgcgccctgcgcttccctccgcccgcgctgcggccatggcgcggcgctgactggcctggcccggccccgccgcgctcccgctcgccccgacccgcactcgggcccgcccgggctccggcctgccgccgcctcttccttctccagccggcaggcccgcgccgcttaggagggagagcccacccgcgccaggaggccgaacgcggactcgccacccggcttcagaatggcagaagatgatccatatttgggaaggcctgaacaaatgtttcatttggatccttctttgactcatacaatatttaatccagaagtatttcaaccacagatggcactgccaacagcagatggcccataccttcaaatattagagcaacctaaacagagaggatttcgtttccgttatgtatgtgaaggcccatcccatggtggactacctggtgcctctagtgaaaagaacaagaagtcttaccctcaggtcaaaatctgcaactatgtgggaccagcaaaggttattgttcagttggtcacaaatggaaaaaatatccacctgcatgcccacagcctggtgggaaaacactgtgaggatgggatctgcactgtaactgctggacccaaggacatggtggtcggcttcgcaaacctgggtatacttcatgtgacaaagaaaaaagtatttgaaacactggaagcacgaatgacagaggcgtgtataaggggctataatcctggactcttggtgcaccctgaccttgcctatttgcaagcagaaggtggaggggaccggcagctgggagatcgggaaaaagagctaatccgccaagcagctctgcagcagaccaaggagatggacctcagcgtggtgcggctcatgtttacagcttttcttccggatagcactggcagcttcacaaggcgcctggaacccgtggtatcagacgccatctatgacagtaaagcccccaatgcatccaacttgaaaattgtaagaatggacaggacagctggatgtgtgactggaggggaggaaatttatcttctttgtgacaaagttcagaaagatgacatccagattcgattttatgaagaggaagaaaatggtggagtctgggaaggatttggagatttttcccccacagatgttcatagacaatttgccattgtcttcaaaactccaaagtataaagatattaatattacaaaaccagcctctgtgtttgtccagcttcggaggaaatctgacttggaaactagtgaaccaaaacctttcctctactatcctgaaatcaaagataaagaagaagtgcagaggaaacgtcagaagctcatgcccaatttttcggatagtttcggcggtggtagtggtgctggagctggaggcggaggcatgtttggtagtggcggtggaggagggggcactggaagtacaggtccagggtatagcttcccacactatggatttcctacttatggtgggattactttccatcctggaactactaaatctaatgctgggatgaagcatggaaccatggacactgaatctaaaaaggaccctgaaggttgtgacaaaagtgatgacaaaaacactgtaaacctctttgggaaagttattgaaaccacagagcaagatcaggagcccagcgaggccaccgttgggaatggtgaggtcactctaacgtatgcaacaggaacaaaagaagagagtgctggagttcaggataacctctttctagagaaggctatgcagcttgcaaagaggcatgccaatgcccttttcgactacgcggtgacaggagacgtgaagatgctgctggccgtccagcgccatctcactgctgtgcaggatgagaatggggacagtgtcttacacttagcaatcatccaccttcattctcaacttgtgagggatctactagaagtcacatctggtttgatttctgatgacattatcaacatgagaaatgatctgtaccagacgcccttgcacttggcagtgatcactaagcaggaagatgtggtggaggatttgctgagggctggggccgacctgagccttctggaccgcttgggtaactctgttttgcacctagctgccaaagaaggacatgataaagttctcagtatcttactcaagcacaaaaaggcagcactacttcttgaccaccccaacggggacggtctgaatgccattcatctagccatgatgagcaatagcctgccatgtttgctgctgctggtggccgctggggctgacgtcaatgctcaggagcagaagtccgggcgcacagcactgcacctggctgtggagcacgacaacatctcattggcaggctgcctgctcctggagggtgatgcccatgtggacagtactacctacgatggaaccacacccctgcatatagcagctgggagagggtccaccaggctggcagctcttctcaaagcagcaggagcagatcccctggtggagaactttgagcctctctatgacctggatgactcttgggaaaatgcaggagaggatgaaggagttgtgcctggaaccacgcctctagatatggccaccagctggcaggtatttgacatattaaatgggaaaccatatgagccagagtttacatctgatgatttactagcacaaggagacatgaaacagctggctgaagatgtgaagctgcagctgtataagttactagaaattcctgatccagacaaaaactgggctactctggcgcagaaattaggtctggggatacttaataatgccttccggctgagtcctgctccttccaaaacacttatggacaactatgaggtctctgggggtacagtcagagagctggtggaggccctgagacaaatgggctacaccgaagcaattgaagtgatccaggcagcctccagcccagtgaagaccacctctcaggcccactcgctgcctctctcgcctgcctccacaaggcagcaaatagacgagctccgagacagtgacagtgtctgcgacagcggcgtggagacatccttccgcaaactcagctttaccgagtctctgaccagtggtgcctcactgctaactctcaacaaaatgccccatgattatgggcaggaaggacctctagaaggcaaaatttagcctgctgacaatttcccacaccgtgtaaaccaaagccctaaaattccactgcgttgtccacaagacagaagctgaagtgcatccaaaggtgctcagagagccggcccgcctgaatcattctcgatttaactcgagaccttttcaacttggcttcctttcttggttcataaatgaattttagtttggttcacttacagatagtatctagcaatcacaacactggctgagcggatgcatctggggatgaggttgcttactaagctttgccagctgctgctggatcacagctgctttctgttgtcattgctgttgtccctctgctacgttcctattgtcattaaaggtatcacggtcgccacctggcattccttctgaccacagcatcattttgcattcaaattaagggttaagaaaagagatattttaaaatgagagtcacttgatgtgccattttaaaaaaaaaggcatattgctttttctaatgtggttatttctctgatttgcaaaaaaaaaaaaaaaaaaaatacttgtcaatatttaaacatggttacaatcattgctgaaaatggtattttcccccttttctgcattttgctattgtaaatatgttttttagatcaaatactttaaaggaaaaaatgttggatttataaatgctattttttattttacttttataataaaaggaaaagcaaattgatgacctcaaaaaaaaa

SEQ ID NO: 47 - DNA, 1031 bp, Homo sapiens
  gene (1)..(1031): Accession No. NM_198175
gcagaagcgttccgtgcgtgcaagtgctgcgaaccacgtgggtcccgggcgcgtttcgggtgctggcggctgcagccggagttcaaacctaagcagctggaagggccctgtggctaggtaccatagagtctctacacaggactaagtcagcctggtgtgcaggggaggcagacacacaaacagaaaattggactacagtgctaagatgctgtaagaagaggttaactaaaggacaggaagatggggccaagagatggtgctactgtctactttagggatcgtctttcaaggcgaggggcctcctatctcaagctgtgatacaggaaccatggccaactgtgagcgtaccttcattgcgatcaaaccagatggggtccagcggggtcttgtgggagagattatcaagcgttttgagcagaaaggattccgccttgttggtctgaaattcatgcaagcttccgaagatcttctcaaggaacactacgttgacctgaaggaccgtccattctttgccggcctggtgaaatacatgcactcagggccggtagttgccatggtctgggaggggctgaatgtggtgaagacgggccgagtcatgctcggggagaccaaccctgcagactccaagcctgggaccatccgtggagacttctgcatacaagttggcaggaacattatacatggcagtgattctgtggagagtgcagagaaggagatcggcttgtggtttcaccctgaggaactggtagattacacgagctgtgctcagaactggatctatgaatgacaggagggcagaccacattgcttttcacatccatttcccctccttcccatgggcagaggaccaggctgtaggaaatctagttatttacaggaacttcatcataatttggagggaagctcttggagctgtgagttctccctgtacagtgttaccatccccgaccatctgattaaaatgcttcctcccagcataggattcattgagttggttacttcatattgttgcattgcttttttttccttct

SEQ ID NO: 48 - DNA, 3271 bp, Homo sapiens
  gene (1)..(3271): Accession No. NM_003269
agggacgccctattcccctccccgcggctgcctgtcagagcgcttctggagatattacaggggacccagcccgcagcgacaggcacaaagtcacggggtaatgaacttcggggacccttcgccgctgcgtgcgcggctctccccggaaacccggacctggccgcctcttccctcggaagatttcccagcaatctagttttcccactctgcgcttgggttccggcagcgcggagcccgtctgcctctgagactgcggtagtgttttccttctttccttgggagaccagcggtcggcagagattgcccacactctgcatgcctatgtagagggagagatcgaagactgagtgacaggaatggggaaaaagagggatttcgctccgtaggaaggccattttcgtgtctccatctctgtctttcaacatccctctcttgctgttcttccttcttcctcagtcttcctgtccatctctccatctgtctgtccatgtgtgtgtccatatcaagcagcattcccagcagctgcggttttgcaagagccgggaagaaacttaaggatgcttaaatttccactgttggacgaattctgagcgcccagggagcagcgcagcgcgcgactgacacccacctgtcccgcccaggagccttgcaggctggagggcagctggagagcggcggcgcccggcggcgaggcgggcgctgccggccgggactcgggcagcgcccaccaaccgctccgccccgggacagccagcatgagcaagccagccggatcaacaagccgcattttagatatcccctgcaaagtgtgtggcgaccgcagctcggggaagcactacggggtctacgcctgcgacggctgctcaggttttttcaaacggagcatccgaaggaataggacctatgtctgcaaatctggaaaccagggaggctgtccggtggacaagacgcacagaaaccagtgcagggcgtgtcggctgaagaagtgtttggaagtcaacatgaacaaagacgccgtgcagcacgagcgggggcctcggacgtccaccatccgcaagcaagtggccctctacttccgtggacacaaggaggagaacggggccgccgcgcactttccctcggcggcgctccctgcgccggccttcttcaccgcggtcacgcagctggagccgcacggcctggagctggccgcggtgtccaccactccagagcggcagaccctcgtgagcctggctcagcccacgcccaagtacccccatgaagtgaatgggaccccaatgtatctctatgaagtggccacggagtcggtgtgtgaatcagctgccagacttctcttcatgagcatcaagtgggctaagagtgtgccagccttctccacgctgtctttgcaagaccagctgatgcttttggaagatgcttggagagaactgtttgttctaggaatagcacaatgggccattccggttgatgctaacactctactggctgtatctggcatgaacggtgacaacacagattcccagaagctgaacaagatcatatctgaaatacaggctttacaagaggtggtggctcgatttagacaactccggttagatgctactgaatttgcctgtctaaaatgcatcgtcactttcaaagccgttcctacacatagtggttctgaactgagaagtttccggaatgctgccgccattgcagcccttcaagatgaggctcagctaacgctcaacagctacatccataccagatatcccactcaaccctgtcgctttggaaaactcctgttgcttttgccagctttacgttctattagcccatcaactatagaagaagtgtttttcaaaaaaaccatcggcaatgtgccaattacaagactgctttcagatatgtacaaatccagtgatatctaagctcacaagatacccacttttcaggatgggacagtatcagatgaacttcaacccatggagaacaagcctcaactaacaaacccttcaggaagcatataccggggaatgtgtagccttcaggaaaaaaatgccaattgacacaaagcattccagtagctatgacctgccgccctgaccaggatagggcgggtgggaaggagaggggtgcaacaggaccgcctgcactgaaaactcactgctgccatgccctgggagggggcaaactgggggttgccacaggccgtgccattctgcctcttacctggaagatcaggctgaacgatcaaaagctgaaacataagtagtgctttctcttcctttttagcatacaaagtttggtaaccaaatatagctctgtgtataacatcgtactgcggccttcaaaactacgttatgttggagcatttattttaaaaataatggtaggttttaaattaaaagtgttatcaaaagtttcccctctattgtaatacattattaagtggccttcagaactgagttaataagtgaaaagtagcttatgccatgtgatttgctttttctctatcttcttttttcttttctttctctttcttttgttctttcttcttcttttttaataccataggccaggcaaccttgtcaaaggaattgatggacaaaatgagattctcaccaggacttcaggttggataacatgtcaaaaagagaagagctttactaaaagaacataagtcaagggaggatgaataaaaacagcaaaaccaaataaagtggagatgagtgattgagtgaggtagattgctgtcccgttaacatagtgctgaaaccaaaggcagtgggggtccaaactcgtggtgcagcaagtcacaccagacaggaaacgaatatggacgtaattgcagaaggaacttcaaggagatgaatgaatgctaaaagggttcttgactgatccattgctaacagcctgagactcttcaatgcctttccgaaaactggtttctagtaaagccttgaatgaacacacacacacacacacacacacacacacacacacacacacacacacaccgtcctacactttaagctgctcctttggtatgactctatacttatggaaatgtagaaacaaacatttttaaatagctgctgtacttttcacattttgatttattaggtactagcactgaggaaaaaaaattcagcacttggactatcataggatgagtaaaacttttcttgtacaaagtgaattaactgatttgtgaagttaaaaggttgtactcattgtatttacaaagaataaaaatatattgaatttaaatgaaaaaaaaaaaaaa

SEQ ID NO: 49 - DNA, 6821 bp, Homo sapiens
  gene (1)..(6821): Accession No. NM_014840
aatctcccaaggcctaaggaggcaagaggcctgcaaatcgcctcctgctcagcaaacgggttgctcagcaggcccggggtcctggtccaccccaggtccctggtttgcccacctccgatggcggccttcgctggcagggtgggcgcctctggggagccagctccgtcccggcgcctttagagccccatctcttccacgtccctggccttcctccccttccaggcggctgtccccgccggggtccagatggtgtcggagggccggcggttcgacggcgggcccggggttcagcctcccggcctccctccgtccctgactctcctttcttcggagagggcgcgggggccggggccaaagcgccgctcttggggttctcctggactcggagttgccccaggcgggcgcagctctgccccgcggggtgccagcctcgggcgggcaaggtccgtgagtcaccgcctgtaaccgaacaccaggcctccctgccccctcccccagctccggccgccaggctgcggcgacacctacaagaaaatgaaggggcgcccaggcccgcggcggccccggccgtatcgcgagcaggtcccggcggcccccggctcgcggcgctctttcttccccggccccggggctcggccagccgcaaccgccgccccggcgccagcaggaatccaggccgagcgaccggccccggagcccgaggcggcggagggcccgcggtagctgcgactggcgagcccgagagcgcccggggagggggcgcccggcttggaatttcccggtcccttccggcccagcgaggacaaagcactcctggccgccgccgccgccgccgccgtggcctacgccgcgccgcacaaagggcgagtcgcgacacgctcccatccccctcccagctcacggcggccccggccccgggtggctgcagggaggtgggggaagccctggctgcaccgcccctcgctccccctcccctggggccgcgcgagcgccgcccccgccccgtctgcgcgtcctcccggggaggggttggggggcgcggcgccccacataacactccccctcctgcgctgcgagccaccctctcccctccctcctgcaaacaccaccgcctcccctgccaccgccgccacctcgcccgacgctccacagctcgccgcggccggggggcggtgcgcggaccgtgcgcgccgcgggcgccagatgtgcagtccccgccgccgccagtgaccgagccgcagtccgagcggtatcgggccgcctccctgatgctgcgggggcgaccttgagcgtacagcggcttccctcggtggggaccccgacatcccagcgctgtgcccggtcttgccctctgtagcccggctcgccccgcgcttggacatggaaggggccgccgcgcctgtggcgggggaccgccccgacttggggctgggggcgccgggctctccccgagaggcggtggcgggggcgactgcagccctggagcccaggaagccgcacggggtgaagcggcatcaccacaagcacaacttgaagcaccgctacgagctgcaggagaccctgggcaaaggcacctacggcaaagtcaagcgggccaccgagaggttttctggccgagtggttgctataaaatccattcgtaaggacaaaattaaggatgaacaagacatggttcacatcagacgagagattgagatcatgtcatctctcaaccatcctcatatcatcagtatttatgaagtgtttgagaacaaagataagattgtgatcatcatggaatatgccagcaaaggggagctgtacgattacatcagtgagcggcgacgcctcagtgagagggagacccggcacttcttccggcagatcgtctctgctgtgcactattgtcacaagaacggtgtggtccaccgggacttgaagctggaaaatatactgctcgatgacaactgcaatattaagattgctgactttgggctttccaacctgtaccagaaggataagttcttacaaacgttttgtgggagtccactctatgcatctcctgagattgtcaatgggagaccttaccgagggccagaggtggacagctgggccctgggtgtgttgctttacactcttgtttatggaacaatgcccttcgatggtttcgatcacaaaaacctcattcggcaaatcagcagcggagagtaccgggagccaacacagccctcagatgctcgaggactcatacggtggatgctgatggtgaaccccgatcgccgggccactattgaggacattgccaaccactggtgggtgaactggggctataagagcagcgtgtgtgactgtgatgccctccatgactctgagtccccactcctggctcggatcattgactggcaccaccgttccacagggctgcaggctgacaccgaagccaaaatgaagggcctggccaaacccacgacctctgaggtcatgctagagcggcagcggtcgctgaagaaatccaagaaagagaatgactttgctcagtctggtcaggatgcagtgcctgaaagcccatccaagttgagttctaagaggcccaaggggatcctgaagaagcgaagcaacagcgagcatcgctctcacagcactggcttcattgaaggtgtagttggtcctgccttaccctctactttcaagatggagcaggacttgtgcaggactggcgtgctcctcccaagctcaccagaggcagaggtgccgggaaaactcagccccaagcagtcggccacgatgcccaagaaaggcatcttgaaaaagacccagcagagagaatcaggttactactcttccccagagcgcagtgagtcttcggagctgttggacagtaatgatgtgatgggcagcagcatcccctcccccagccccccggacccagccagggtaacctcccacagcctctcctgccggaggaagggcatcttgaaacacagcagcaaatactcagcgggcaccatggacccagccctggtcagccctgaaatgcccacactggaatccctgtcagagcctggtgtccctgccgagggcctctcccggagctacagccgcccttccagtgtcatcagcgatgacagcgtgctgtccagcgactcttttgacttgctggatttgcaggagaatcgccctgcccgccagcgcatccgcagctgcgtctctgcagaaaacttcctccagatccaggactttgaggggctccagaaccggccccggccccagtacctgaagcggtaccggaaccggctggcagacagcagcttctccctcctcacagacatggatgatgtgactcaggtctacaagcaagcgctggagatctgcagcaagctcaactagcattccagggcgcccaggggcgggcgggggtacgagggaggaaggggagcaagacttgggctcacaggctggttacctctttgctggctgtgacaacagactgaaaaaggattggcactgtctcacttggccaagtttgcagccttgagccaacacctaaaagggagaggtgggctcttctgccagttctgtcaattgtcagtcagaatttgggccctgtttggcatttgctttatggcacctcctagaggaccagctgtccaggggaggtggtattgaccggcactcagtgggtggagaggaagcatatgtggaaggagcatttccttagaagtcatccagatgcttctggaggaggggcaggagacacttgggctgtttgccttgggtgagcccaaagaacttgccccttttctccttgtattagcaagctaggtctggctgcgtggagctggcaagtagatttcagcaacttgagcttgagttgacgatcaattaatagtggctgccagttgtgctggcgtaagtggcccacatcatggggaaggagtgctgtgattgactagtaatggctaccacgggaaagggaaggggaagcagtagcactaatgctatgtagttgtcatctttgatctggctaggccctgggaatcgggtttagtcatcctgtgggatctatgttaactctttcatgccactggtgaggcatttgttaatttgctactcaactttgaggaaagacagggccttggtcagagagagaatgctctgaactctgctaaggacatagagtcagcccatggtgatttagctccttgctgttcacctcctctttcctgatgtctgccttgctctacagcacaacctcttgagggtggacagggagaaagatgatggtgtcagaggtcaaaactattatatatgacagggcacaagatggtctgtgatctttgcacagatgaatggaagttgatgcacaccaacaagaggcaacttgtcactttctttctcaatattaactggaatgctgcctcttgggttctcacctgcatggatgctttgagttggacgtgatactgtccatattctccagaggattacctggctgaaccattggctctgttcaccagtgacagatggtttccccatccactgagtgtagcatcctcagaggtaggcaagtttgcttctagggagttagcatgtagatgggatattgggatgaggaaaggaaaatcaggtagatggtgctttttttcccccaaatctaagtattctatgtcatggttttaaactttgccatgaactcctgggctttgggggaagagaaagttccattcatttaaatgaataaggtgttgaaagagtgcagggggttgggaggaagcatgtaagagagggaacatttccttagatgttacccagatggttctgggggagacagaaaagaggtgcggcaggactcttatcttaaaaagtaaacaaaacaaaacaaaacaaaacaaaaaactagatatgtaatttctaaacacccagatcacaatgacaagatgccactccaaccatgggacaccttcatgatactaggtttgtacttcctggtctctgggatgacttcagattctgctggccaaggcaaattgaactcagttcaagatggccaccactggtagacgtgtagatagaaaagaggactggtcttgggaacatctttggaaaaaccaacaaacaatagttctagggagatgagaaaaaaattcaccttacagtgctaagaaagtgcattagaatggaattgccctttccttaaggagacagtttgggctctccccttgccaccggctctggtgttttggcttatgcgttccttcaggttgagctgagcagtgtgttatgggaagctgctcaatttcctttcattcaattccacctccttcctgaactctaatagaggttaaaagggaaaaaaaaaattctgtagatagcaaattgtgtgtgtgggggggggtgggggtgtgggtgcatggaggacaacctgcaactctgagctccctacttcctgcctcatttcatgcagtcttttctgaacagcctatgctgctgccctgctggccccttgtgcacggcagctggccgtgtccgtagctgtcagtatgacttagatctagctcctacctactggttgatgtgttttttccttttgccaagtgattgagtctgtttagtagtttccatcattctagtctttaagtaaaaatgacactattgaggaaagtcagtctactcccttcttcctccccccaaacacgtgttctcttttgtcaggaaactcagccagtggactgtggcagagaaagtcctccactcagaggcagagactgagttaagtcataggtggccttaggcatctgcattgtttgcaggggttaagttttccttccagtgagggctggagggatgaattagctggtacctgaagccccgcttagctctgacactctgccaacatcctctgattctaggtgtggtgttgactgtcctttcaaggaaaaacttgcaatagagggaaaagccattaaagcagctccctgcttcatcattaagtcctgtcatccctaccagccaatcccagtcaaagaagttatgctttattcacttctgtggaattacaagtgagagacacttttaggacctgatggacaaagcaggagattcactgtcagctttcctggtcctctccttacttctgtgggccttgcaccgtcttagtttacacatctgccaaaggggtagaattacacttctttttacaggtaaatgtcaaggcacaatcagttttcaggaagtgcttcaagaccccaggtgaaatgaaaatgctaagtaccctctgaatggccatgcctgttaccaggtgctgcttcttcagatgatggggagcacttttcagggtgaaattcaggcgagttttgcccaggcctgctgtcttgagtacaaatgtgaatgatcgactgactgcttgttgccaaactggaaatgttctgtagggatttactggcatggtatcattcctagaagaaaaaaagagagaaacttgactgcacattaaaaaaaaaaaaaaatccacattgtgacttttatttaatttctattttttttggtaataaaaagttgacttttttatttgaatttgtcttttttatttattggtctgaaaggcatttcaaaggtattataataatatattggtgtaatttaattggtgcaacatgctttatggctcctgtcaaaattggttttcactcatttgattggtttgagcccagaacagcctacaggggaaaaacaagctggataaccacccaaagtgtttgtattttcgttggaaactgatttttgtttcattttggtttttgtttctgtttttatttttaaattaaataaattgcaatgaactg

SEQ ID NO: 50 - DNA, 3053 bp, Homo sapiens
  gene (1)..(3053): Accession No. NM_000298
cattccatggtcccgcagccccaggcccacactgaaagcatgtcgatccaggagaacatatcatccctgcagcttcggtcatgggtctctaagtcccaaagagacttagcaaagtccatcctgattggggctccaggagggccagcggggtatctgcggcgggccagtgtggcccaactgacccaggagctgggcactgccttcttccagcagcagcagctgccagctgctatggcagacaccttcctggaacacctctgcctactggacattgactccgagcccgtggctgctcgcagtaccagcatcattgccaccatcgggccagcatctcgctccgtggagcgcctcaaggagatgatcaaggccgggatgaacattgcgcgactcaacttctcccacggctcccacgagtaccatgctgagtccatcgccaacgtccgggaggcggtggagagctttgcaggttccccactcagctaccggcccgtggccatcgccctggacaccaagggaccggagatccgcactgggatcctgcaggggggtccagagtcggaagtggagctggtgaagggctcccaggtgctggtgactgtggaccccgcgttccggacgcgggggaacgcgaacaccgtgtgggtggactaccccaatattgtccgggtcgtgccggtggggggccgcatctacattgacgacgggctcatctccctagtggtccagaaaatcggcccagagggactggtgacccaagtggagaacggcggcgtcctgggcagccggaagggcgtgaacttgccaggggcccaggtggacttgcccgggctgtccgagcaggacgtccgagacctgcgcttcggggtggagcatggggtggacatcgtctttgcctcctttgtgcggaaagccagcgacgtggctgccgtcagggctgctctgggtccggaaggacacggcatcaagatcatcagcaaaattgagaaccacgaaggcgtgaagaggtttgatgaaatcctggaggtgagcgacggcatcatggtggcacggggggacctaggcatcgagatcccagcagagaaggttttcctggctcagaagatgatgattgggcgctgcaacttggcgggcaagcctgttgtctgtgccacacagatgctggagagcatgattaccaagccccggccaacgagggcagagacaagcgatgtcgccaatgctgtgctggatggggctgactgcatcatgctgtcaggggagactgccaagggcaacttccctgtggaagcggtgaagatgcagcatgcgattgcccgggaggcagaggccgcagtgtaccaccggcagctgtttgaggagctacgtcgggcagcgccactaagccgtgatcccactgaggtcaccgccattggtgctgtggaggctgccttcaagtgctgtgctgctgccatcattgtgctgaccacaactggccgctcagcccagcttctgtctcggtaccgacctcgggcagcagtcattgctgtcacccgctctgcccaggctgcccgccaggtccacttatgccgaggagtcttccccttgctttaccgtgaacctccagaagccatctgggcagatgatgtagatcgccgggtgcaatttggcattgaaagtggaaagctccgtggcttcctccgtgttggagacctggtgattgtggtgacaggctggcgacctggctccggctacaccaacatcatgcgggtgctaagcatatcctgagacgcccctccctcctctggcccagcctacccttgtaccccatcccttcctccccagtctacgttctccagcccacacccctccaaagccccacctttaagtcctctcttctctattcctgaccctccctacctgaggcctatctgagactataactgtcatctagccccttcgaggttgccccttccccatctccatttcacacaggtcctgaaagtctgtgtccaattatgcactggccacccaacagcaccaattgtacattccctgcatccaatctgctcagcaggccctaagatgccttgagtctttaatcccagtttggctggttaattccataaccccaggcatcccatcccttggggtgggggagaggggagacagggcaatcttgtccacagtctcccattctcatatgtagccctcatgataatctgggcatctcgtgccagggcaggctaccccttcatggtgactaacagttacatgaaagtccacgcttttgggaaaactgggtgggatggatgctggggagaagtgagggctgggcagctgattttgtcactgtcttcacaacctccgtgctgggcttgtagaccactgtcctggctgctctcatgcctgcctgataccctgcttggtcaaatccccggctgcttccttctgcacccagaaattccttcccactcatgttgttcccacacacaaaccaagagccaaaaatgagtgtgtctattttatatttaaacccagctgtttggaagcaattataaaacttctcccacacaccaagaaccccagaactccccacccagaaggaaaggagacttagggtcctggtcccacagtctttaatgctgtagagtaggagaggggacaggcagagtgagggtggtaaaggactactcttgtccctgagaaggcagaggtgctggctggcctgcccttccccaggcttggataccttgggcctttcccttattcctgcaccaacagcaaactcagaaggaaaaaacaaaacaaaactctaaaggtaaacgcggtccttctccctctctcatgtggctcctcctgcccctacctgggagaaggttcaagtattgcgctgatgggtttgggcaaggaccacagaggctggcatggagaggccctgcctcctcctactcctcctgtctccttacctgaaaaggaggggagggatggataaaggaatgggtaaacaaaattaattggtaacacataaagttagtaaatgaataaatacaattaaataaatgaaaaaaaaaaaa

SEQ ID NO: 51 - DNA, 1892 bp, Homo sapiens
  gene (1)..(1892): Accession No. NM_138712
ggcgcccgcgcccgcccccgcgccgggcccggctcggcccgacccggctccgccgcgggcaggcggggcccagcgcactcggagcccgagcccgagccgcagccgccgcctggggcgcttgggtcggcctcgaggacaccggagaggggcgccacgccgccgtggccgcagatttgaaagaagccaacactaaaccacaaatatacaacaaggccattttctcaaacgagagtcagcctttaacgaaatgaccatggttgacacagagatgccattctggcccaccaactttgggatcagctccgtggatctctccgtaatggaagaccactcccactcctttgatatcaagcccttcactactgttgacttctccagcatttctactccacattacgaagacattccattcacaagaacagatccagtggttgcagattacaagtatgacctgaaacttcaagagtaccaaagtgcaatcaaagtggagcctgcatctccaccttattattctgagaagactcagctctacaataagcctcatgaagagccttccaactccctcatggcaattgaatgtcgtgtctgtggagataaagcttctggatttcactatggagttcatgcttgtgaaggatgcaagggtttcttccggagaacaatcagattgaagcttatctatgacagatgtgatcttaactgtcggatccacaaaaaaagtagaaataaatgtcagtactgtcggtttcagaaatgccttgcagtggggatgtctcataatgccatcaggtttgggcggatgccacaggccgagaaggagaagctgttggcggagatctccagtgatatcgaccagctgaatccagagtccgctgacctccgggccctggcaaaacatttgtatgactcatacataaagtccttcccgctgaccaaagcaaaggcgagggcgatcttgacaggaaagacaacagacaaatcaccattcgttatctatgacatgaattccttaatgatgggagaagataaaatcaagttcaaacacatcacccccctgcaggagcagagcaaagaggtggccatccgcatctttcagggctgccagtttcgctccgtggaggctgtgcaggagatcacagagtatgccaaaagcattcctggttttgtaaatcttgacttgaacgaccaagtaactctcctcaaatatggagtccacgagatcatttacacaatgctggcctccttgatgaataaagatggggttctcatatccgagggccaaggcttcatgacaagggagtttctaaagagcctgcgaaagccttttggtgactttatggagcccaagtttgagtttgctgtgaagttcaatgcactggaattagatgacagcgacttggcaatatttattgctgtcattattctcagtggagaccgcccaggtttgctgaatgtgaagcccattgaagacattcaagacaacctgctacaagccctggagctccagctgaagctgaaccaccctgagtcctcacagctgtttgccaagctgctccagaaaatgacagacctcagacagattgtcacggaacacgtgcagctactgcaggtgatcaagaagacggagacagacatgagtcttcacccgctcctgcaggagatctacaaggacttgtactagcagagagtcctgagccactgccaacatttcccttcttccagttgcactattctgagggaaaatctgacacctaagaaatttactgtgaaaaagcattttaaaaagaaaaggttttagaatatgatctattttatgcatattgtttataaagacacatttacaatttacttttaatattaaaaattaccatattatgaaattgctgatagta

SEQ ID NO: 52 - DNA, 2302 bp, Homo sapiens
  gene (1)..(2302): Accession No. NM_000447
ggggcctgggccggcgccgggtccggccgggcgctcagccagctgcgtaaactccgctggagcgcggcggcagagcaggcatttccagcagtgaggagacagccagaagcaagcttttggagctgaaggaacctgagacagaagctagtcccccctctgaattttactgatgaagaaactgaggccacagagctaaagtgacttttcccaaggtcgcccagcgaggacgtgggacttctcagacgtcaggagagtgatgtgagggagctgtgtgaccatagaaagtgacgtgttaaaaaccagcgctgccctctttgaaagccagggagcatcattcatttagcctgctgagaagaagaaaccaagtgtccgggattcagacctctctgcggccccaagtgttcgtggtgcttccagaggcagggctatgctcacattcatggcctctgacagcgaggaagaagtgtgtgatgagcggacgtccctaatgtcggctgagagccccacgccgcgctcctgccaggagggcaggcagggcccagaggatggagagaacactgcccagtggagaagccaggagaacgaggaggacggtgaggaggaccctgaccgctatgtctgtagtggggttcccgggcggccgccaggcctggaggaagagctgaccctcaaatacggagcgaagcacgtgatcatgctgtttgtgcctgtcactctgtgcatgatcgtggtggtagccaccatcaagtctgtgcgcttctacacagagaagaatggacagctcatctacacgccattcactgaggacacaccctcggtgggccagcgcctcctcaactccgtgctgaacaccctcatcatgatcagcgtcatcgtggttatgaccatcttcttggtggtgctctacaagtaccgctgctacaagttcatccatggctggttgatcatgtcttcactgatgctgctgttcctcttcacctatatctaccttggggaagtgctcaagacctacaatgtggccatggactaccccaccctcttgctgactgtctggaacttcggggcagtgggcatggtgtgcatccactggaagggccctctggtgctgcagcaggcctacctcatcatgatcagtgcgctcatggccctagtgttcatcaagtacctcccagagtggtccgcgtgggtcatcctgggcgccatctctgtgtatgatctcgtggctgtgctgtgtcccaaagggcctctgagaatgctggtagaaactgcccaggagagaaatgagcccatattccctgccctgatatactcatctgccatggtgtggacggttggcatggcgaagctggacccctcctctcagggtgccctccagctcccctacgacccggagatggaagaagactcctatgacagttttggggagccttcataccccgaagtctttgagcctcccttgactggctacccaggggaggagctggaggaagaggaggaaaggggcgtgaagcttggcctcggggacttcatcttctacagtgtgctggtgggcaaggcggctgccacgggcagcggggactggaataccacgctggcctgcttcgtggccatcctcattggcttgtgtctgaccctcctgctgcttgctgtgttcaagaaggcgctgcccgccctccccatctccatcacgttcgggctcatcttttacttctccacggacaacctggtgcggccgttcatggacaccctggcctcccatcagctctacatctgagggacatggtgtgccacaggctgcaagctgcagggaattttcattggatgcagttgtatagttttacactctagtgccatatatttttaagacttttctttccttaaaaaataaagtacgtgtttacttggtgaggaggaggcagaaccagctctttggtgccagctgtttcatcaccagactttggctcccgctttggggagcgcctcgcttcacggacaggaagcacagcaggtttatccagatgaactgagaaggtcagattagggcggggagaagagcatccggcatgagggctgagatgcgcaaagagtgtgctcgggagtggcccctggcacctgggtgctctggctggagaggaaaagccagttccctacgaggagtgttcccaatgctttgtccatgatgtccttgttattttattgcctttagaaactgagtcctgttcttgttacggcagtcacactgctgggaagtggcttaatagtaatatcaataaatagatgagtcctgttagaatcttgaaaa

SEQ ID NO: 53 - DNA, 4507 bp, Homo sapiens
  gene (1)..(4507): Accession No. NM_000963
gaccaattgtcatacgacttgcagtgagcgtcaggagcacgtccaggaactcctcagcagcgcctccttcagctccacagccagacgccctcagacagcaaagcctacccccgcgccgcgccctgcccgccgctgcgatgctcgcccgcgccctgctgctgtgcgcggtcctggcgctcagccatacagcaaatccttgctgttcccacccatgtcaaaaccgaggtgtatgtatgagtgtgggatttgaccagtataagtgcgattgtacccggacaggattctatggagaaaactgctcaacaccggaatttttgacaagaataaaattatttctgaaacccactccaaacacagtgcactacatacttacccacttcaagggattttggaacgttgtgaataacattcccttccttcgaaatgcaattatgagttatgtgttgacatccagatcacatttgattgacagtccaccaacttacaatgctgactatggctacaaaagctgggaagccttctctaacctctcctattatactagagcccttcctcctgtgcctgatgattgcccgactcccttgggtgtcaaaggtaaaaagcagcttcctgattcaaatgagattgtggaaaaattgcttctaagaagaaagttcatccctgatccccagggctcaaacatgatgtttgcattctttgcccagcacttcacgcatcagtttttcaagacagatcataagcgagggccagctttcaccaacgggctgggccatggggtggacttaaatcatatttacggtgaaactctggctagacagcgtaaactgcgccttttcaaggatggaaaaatgaaatatcagataattgatggagagatgtatcctcccacagtcaaagatactcaggcagagatgatctaccctcctcaagtccctgagcatctacggtttgctgtggggcaggaggtctttggtctggtgcctggtctgatgatgtatgccacaatctggctgcgggaacacaacagagtatgcgatgtgcttaaacaggagcatcctgaatggggtgatgagcagttgttccagacaagcaggctaatactgataggagagactattaagattgtgattgaagattatgtgcaacacttgagtggctatcacttcaaactgaaatttgacccagaactacttttcaacaaacaattccagtaccaaaatcgtattgctgctgaatttaacaccctctatcactggcatccccttctgcctgacacctttcaaattcatgaccagaaatacaactatcaacagtttatctacaacaactctatattgctggaacatggaattacccagtttgttgaatcattcaccaggcaaattgctggcagggttgctggtggtaggaatgttccacccgcagtacagaaagtatcacaggcttccattgaccagagcaggcagatgaaataccagtcttttaatgagtaccgcaaacgctttatgctgaagccctatgaatcatttgaagaacttacaggagaaaaggaaatgtctgcagagttggaagcactctatggtgacatcgatgctgtggagctgtatcctgcccttctggtagaaaagcctcggccagatgccatctttggtgaaaccatggtagaagttggagcaccattctccttgaaaggacttatgggtaatgttatatgttctcctgcctactggaagccaagcacttttggtggagaagtgggttttcaaatcatcaacactgcctcaattcagtctctcatctgcaataacgtgaagggctgtccctttacttcattcagtgttccagatccagagctcattaaaacagtcaccatcaatgcaagttcttcccgctccggactagatgatatcaatcccacagtactactaaaagaacgttcgactgaactgtagaagtctaatgatcatatttatttatttatatgaaccatgtctattaatttaattatttaataatatttatattaaactccttatgttacttaacatcttctgtaacagaagtcagtactcctgttgcggagaaaggagtcatacttgtgaagacttttatgtcactactctaaagattttgctgttgctgttaagtttggaaaacagtttttattctgttttataaaccagagagaaatgagttttgacgtctttttacttgaatttcaacttatattataagaacgaaagtaaagatgtttgaatacttaaacactgtcacaagatggcaaaatgctgaaagtttttacactgtcgatgtttccaatgcatcttccatgatgcattagaagtaactaatgtttgaaattttaaagtacttttggttatttttctgtcatcaaacaaaaacaggtatcagtgcattattaaatgaatatttaaattagacattaccagtaatttcatgtctactttttaaaatcagcaatgaaacaataatttgaaatttctaaattcatagggtagaatcacctgtaaaagcttgtttgatttcttaaagttattaaacttgtacatataccaaaaagaagctgtcttggatttaaatctgtaaaatcagtagaaattttactacaattgcttgttaaaatattttataagtgatgttcctttttcaccaagagtataaacctttttagtgtgactgttaaaacttccttttaaatcaaaatgccaaatttattaaggtggtggagccactgcagtgttatcttaaaataagaatattttgttgagatattccagaatttgtttatatggctggtaacatgtaaaatctatatcagcaaaagggtctacctttaaaataagcaataacaaagaagaaaaccaaattattgttcaaatttaggtttaaacttttgaagcaaacttttttttatccttgtgcactgcaggcctggtactcagattttgctatgaggttaatgaagtaccaagctgtgcttgaataatgatatgttttctcagattttctgttgtacagtttaatttagcagtccatatcacattgcaaaagtagcaatgacctcataaaatacctcttcaaaatgcttaaattcatttcacacattaattttatctcagtcttgaagccaattcagtaggtgcattggaatcaagcctggctacctgcatgctgttccttttcttttcttcttttagccattttgctaagagacacagtcttctcatcacttcgtttctcctattttgttttactagttttaagatcagagttcactttctttggactctgcctatattttcttacctgaacttttgcaagttttcaggtaaacctcagctcaggactgctatttagctcctcttaagaagattaaaagagaaaaaaaaaggcccttttaaaaatagtatacacttattttaagtgaaaagcagagaattttatttatagctaattttagctatctgtaaccaagatggatgcaaagaggctagtgcctcagagagaactgtacggggtttgtgactggaaaaagttacgttcccattctaattaatgccctttcttatttaaaaacaaaaccaaatgatatctaagtagttctcagcaataataataatgacgataatacttcttttccacatctcattgtcactgacatttaatggtactgtatattacttaatttattgaagattattatttatgtcttattaggacactatggttataaactgtgtttaagcctacaatcattgatttttttttgttatgtcacaatcagtatatcttctttggggttacctctctgaatattatgtaaacaatccaaagaaatgattgtattaagatttgtgaataaatttttagaaatctgattggcatattgagatatttaaggttgaatgtttgtccttaggataggcctatgtgctagcccacaaagaatattgtctcattagcctgaatgtgccataagactgaccttttaaaatgttttgagggatctgtggatgcttcgttaatttgttcagccacaatttattgagaaaatattctgtgtcaagcactgtgggttttaatatttttaaatcaaacgctgattacagataatagtatttatataaataattgaaaaaaattttcttttgggaagagggagaaaatgaaataaatatcattaaagataactcaggagaatcttctttacaattttacgtttagaatgtttaaggttaagaaagaaatagtcaatatgcttgtataaaacactgttcactgttttttttaaaaaaaaaacttgatttgttattaacattgatctgctgacaaaacctgggaatttgggttgtgtatgcgaatgtttcagtgcctcagacaaatgtgtatttaacttatgtaaaagataagtctggaaataaatgtctgtttatttttgtactatttaaaaattgacagatcttttctgaagaaaaaaaaaaaaaaa

SEQ ID NO: 54 - DNA, 1126 bp, Homo sapiens
  gene (1)..(1126): Accession No. NM_014059
gtggcgagggcggtgcctgggggcaggggcctcctcggagggcggcggggacagacccgtcgccccggctccgcagccccgccccggccccgcctccgctccggccgccgaaggctataagatctaggaacccgagccggtggtagggcgggcgcggaccgtgctgggagcggcgcggctggagcgcagcgccgaagggactggcagggctgaagtgtgcgggacagcaagcccccgaatagccccggctgccacctcgcaggacccaaggccacgcgcgccgggcccagctgagccgcctcatgaagccgcccgcggcgcagggcagccccgcggccgccgcggccgcagccccggccctggactcggcggccgcggaggacctgtcggacgcgctgtgcgagtttgacgcggtgctggccgacttcgcgtcgcccttccacgagcgccacttccactacgaggagcacctggagcgcatgaagcggcgcagcagcgccagtgtcagcgacagcagcggcttcagcgactcggagagtgcagattcactttataggaacagcttcagcttcagtgatgaaaaactgaattctccaacagactctaccccagctcttctctctgccactgtcactcctcagaaagctaaattaggagacacaaaagagctagaagccttcattgctgatcttgacaaaactttagcaagtatgtgaaacaagaagttctgggtcctttcatcataagggagaagcttcagaaagttccgaggacctgctaaaatcagctactagaatctgctgccagaggggacaaagacgtgcactcaaccttctaccaggccactctcaggctcaccttaaaatcagcccttgatcccatttctgggcaatttagacagtgaaactgactttgtttacctgcttgcagcatattagaacagacgatccatgctaatattgtattttctcttaaaacatagctttcctgtaatttaaagtgcttttatgaaaatatttgtaattaattatatatagttggaaatagcagtaagctttcccattataatatatttttgtatacaaataaaatttgaactgaagtctgcaaaaaaaaaaaaaaaaaa

SEQ ID NO: 55 - DNA, 930 bp, Homo sapiens
  gene (1)..(930): Accession No. NM_001006
aagttctcgcgcgactcccacttccgcccttttggctctctgaccagcaccatggcggttggcaagaacaagcgccttacgaaaggcggcaaaaagggagccaagaagaaagtggttgatccattttctaagaaagattggtatgatgtgaaagcacctgctatgttcaatataagaaatattggaaagacgctcgtcaccaggacccaaggaaccaaaattgcatctgatggtctcaagggtcgtgtgtttgaagtgagtcttgctgatttgcagaatgatgaagttgcatttagaaaattcaagctgattactgaagatgttcagggtaaaaactgcctgactaacttccatggcatggatcttacccgtgacaaaatgtgttccatggtcaaaaaatggcagacaatgattgaagctcacgttgatgtcaagactaccgatggttacttgcttcgtctgttctgtgttggttttactaaaaaacgcaacaatcagatacggaagacctcttatgctcagcaccaacaggtccgccaaatccggaagaagatgatggaaatcatgacccgagaggtgcagacaaatgacttgaaagaagtggtcaataaattgattccagacagcattggaaaagacatagaaaaggcttgccaatctatttatcctctccatgatgtcttcgttagaaaagtaaaaatgctgaagaagcccaagtttgaattgggaaagctcatggagcttcatggtgaaggcagtagttctggaaaagccactggggacgagacaggtgctaaagttgaacgagctgatggatatgaaccaccagtccaagaatctgtttaaagttcagacttcaaatagtggcaaataaaaagtgctatttgtgatggtttgcttctgaaaaaaaaaaaaaaaaaaaaaaaaaaa

SEQ ID NO: 56 - DNA, 512 bp, Homo sapiens
  gene (1)..(512): Accession No. NM_002961
attcttcccctctctacaaccctctctcctcagcgcttcttctttcttggtttgatcctgactgctgtcatggcgtgccctctggagaaggccctggatgtgatggtgtccaccttccacaagtactcgggcaaagagggtgacaagttcaagctcaacaagtcagaactaaaggagctgctgacccgggagctgcccagcttcttggggaaaaggacagatgaagctgctttccagaagctgatgagcaacttggacagcaacagggacaacgaggtggacttccaagagtactgtgtcttcctgtcctgcatcgccatgatgtgtaacgaattctttgaaggcttcccagataagcagcccaggaagaaatgaaaactcctctgatgtggttggggggtctgccagctggggccctccctgtcgccagtgggcacttttttttttccaccctggctccttcagacacgtgcttgatgctgagcaagttcaataaagattcttggaagttt

SEQ ID NO: 57 - DNA, 510 bp, Homo sapiens
  gene (1)..(510): Accession No. NM_005980
tgaggctgccttataaagcaccaagaggctgccagtgggacattttctcggccctgccagcccccaggaggaaggtgggtctgaatctagcaccatgacggaactagagacagccatgggcatgatcatagacgtcttttcccgatattcgggcagcgagggcagcacgcagaccctgaccaagggggagctcaaggtgctgatggagaaggagctaccaggcttcctgcagagtggaaaagacaaggatgccgtggataaattgctcaaggacctggacgccaatggagatgcccaggtggacttcagtgagttcatcgtgttcgtggctgcaatcacgtctgcctgtcacaagtactttgagaaggcaggactcaaatgatgccctggagatgtcacagattcctggcagagccatggtcccaggcttcccaaaagtgtttgttggcaattattcccctaggctgagcctgctcatgtacctctgattaataaatgcttatgaaatga

SEQ ID NO: 58 - DNA, 569 bp, Homo sapiens
  gene (1)..(569): Accession No. NM_199161
aggctcagtataaatagcagccaccgctccctggcaggcagggacccgcagctcagctacagcacagatcagcaccatgaagcttctcacgggcctggttttctgctccttggtcctgggtgtcagcagccgaagcttcttttcgttccttggcgaggcttttgatggggctcgggacatgtggagagcctactctgacatgagagaagccaattacatcggctcagacaaatacttccatgctcgggggaactatgatgctgccaaaaggggacctgggggtgcctgggctgcagaagtgatcagcgatgccagagagaatatccagagattctttggccatggtgcggaggactcgctggctgatcaggctgccaatgaatggggcaggagtggcaaagaccccaatcacttccgacctgctggcctgcctgagaaatactgagcttcctcttcactctgctctcaggagatctggctgtgaggccctcagggcagggatacaaagcggggagagggtacacaatgggtatctaataaatacttaagaggtggaatttgtggaaact

SEQ ID NO: 59 - DNA, 2633 bp, Homo sapiens
  gene (1)..(2633): Accession No. NM_002639
agtgggcgtggcggtgctgcccaggtgagccaccgctgcttctgcccagacacggtcgcctccacatccaggtctttgtgctcctcgcttgcctgttccttttccacgcattttccaggataactgtgactccaggcccgcaatggatgccctgcaactagcaaattcggcttttgccgttgatctgttcaaacaactatgtgaaaaggagccactgggcaatgtcctcttctctccaatctgtctctccacctctctgtcacttgctcaagtgggtgctaaaggtgacactgcaaatgaaattggacaggttcttcattttgaaaatgtcaaagatgtaccctttggatttcaaacagtaacatcggatgtaaacaaacttagttccttttactcactgaaactaatcaagcggctctacgtagacaaatctctgaatctttctacagagttcatcagctctacgaagagaccgtatgcaaaggaattggaaactgttgacttcaaagataaattggaagaaacgaaaggtcagatcaacaactcaattaaggatctcacagatggccactttgagaacattttagctgacaacagtgtgaacgaccagaccaaaatccttgtggttaatgctgcctactttgttggcaagtggatgaagaaattttctgaatcagaaacaaaagaatgtcctttcagagtcaacaagacagacaccaaaccagtgcagatgatgaacatggaggccacgttctgtatgggaaacattgacagtatcaattgtaagatcatagagcttccttttcaaaataagcatctcagcatgttcatcctactacccaaggatgtggaggatgagtccacaggcttggagaagattgaaaaacaactcaactcagagtcactgtcacagtggactaatcccagcaccatggccaatgccaaggtcaaactctccattccaaaatttaaggtggaaaagatgattgatcccaaggcttgtctggaaaatctagggctgaaacatatcttcagtgaagacacatctgatttctctggaatgtcagagaccaagggagtggccctatcaaatgttatccacaaagtgtgcttagaaataactgaagatggtggggattccatagaggtgccaggagcacggatcctgcagcacaaggatgaattgaatgctgaccatccctttatttacatcatcaggcacaacaaaactcgaaacatcattttctttggcaaattctgttctccttaagtggcatagcccatgttaagtcctccctgacttttctgtggatgccgatttctgtaaactctgcatccagagattcattttctagatacaataaattgctaatgttgctggatcaggaagccgccagtacttgtcatatgtagccttcacacagatagaccttttttttttttccaattctatcttttgtttccttttttcccataagacaatgacatacgcttttaatgaaaaggaatcacgttagaggaaaaatatttattcattatttgtcaaattgtccggggtagttggcagaaatacagtcttccacaaagaaaattcctataaggaagatttggaagctcttcttcccagcactatgctttccttctttgggatagagaatgttccagacattctcgcttccctgaaagactgaagaaagtgtagtgcatgggacccacgaaactgccctggctccagtgaaacttgggcacatgctcaggctactataggtccagaagtccttatgttaagccctggcaggcaggtgtttattaaaattctgaattttggggattttcaaaagataatattttacatacactgtatgttatagaacttcatggatcagatctggggcagcaccctataaatcaacaccttaatatgctgcaacaaaatgtagaatattcagacaaaatggatacataaagactaagtagcccataaggggtcaaaatttgctgccaaatgcgtatgccaccaacttacaaaaacacttcgttcgcagagcttttcagattgtggaatgttggataaggaattatagacctctagtagctgaaatgcaagaccccaagaggaagttcagatcttaatataaattcactttcatttttgatagctgtcccatctggtcatttggttggcactagactggtggcaggggcttctagctgacttgcacagggattctcacaatagccgatatcagaatttgtgttgaaggaacttgtctcttcatctaatatgatagcgggaaaaggagaggaaactactgcctttagaaaatataagtaaagtgattaaagtgctcacgttaccttgacacatagtttttcagtctatgggtttagttactttagatggcaagcatgtaacttatattaatagtaatttgtaaagttggttggataagctatccgtgttgcaggttcatggattacttctctataaaaaatatgtatttaccaaaaattttgtgacattccttctcccatctcttccttgacctgcattgtaaataggttcttcttgttctgagattcaatattgaatttttcctatgctattgacaataaaatattattgaactaca

SEQ ID NO: 60 - DNA, 2062 bp, Homo sapiens
  gene (1)..(2062): Accession No. NM_002539
gtcagtccctcctgtagccgccgccgccgccgcccgccgcccctctgccagcagctccggcgccacctcgggccggcgtctccggcgggcgggagccaggcgctgacgggcgcggcgggggcggccgagcgctcctgcggctgcgactcaggctccggcgtctgcgcttccccatggggctggcctgcggcgcctgggcgctctgagattgtcactgctgttccaagggcacacgcagagggatttggaattcctggagagttgcctttgtgagaagctggaaatatttctttcaattccatctcttagttttccataggaacatcaagaaatcatgaacaactttggtaatgaagagtttgactgccacttcctcgatgaaggttttactgccaaggacattctggaccagaaaattaatgaagtttcttcttctgatgataaggatgccttctatgtggcagacctgggagacattctaaagaaacatctgaggtggttaaaagctctccctcgtgtcacccccttttatgcagtcaaatgtaatgatagcaaagccatcgtgaagacccttgctgctaccgggacaggatttgactgtgctagcaagactgaaatacagttggtgcagagtctgggggtgcctccagagaggattatctatgcaaatccttgtaaacaagtatctcaaattaagtatgctgctaataatggagtccagatgatgacttttgatagtgaagttgagttgatgaaagttgccagagcacatcccaaagcaaagttggttttgcggattgccactgatgattccaaagcagtctgtcgtctcagtgtgaaattcggtgccacgctcagaaccagcaggctccttttggaacgggcgaaagagctaaatatcgatgttgttggtgtcagcttccatgtaggaagcggctgtaccgatcctgagaccttcgtgcaggcaatctctgatgcccgctgtgtttttgacatgggggctgaggttggtttcagcatgtatctgcttgatattggcggtggctttcctggatctgaggatgtgaaacttaaatttgaagagatcaccggcgtaatcaacccagcgttggacaaatactttccgtcagactctggagtgagaatcatagctgagcccggcagatactatgttgcatcagctttcacgcttgcagttaatatcattgccaagaaaattgtattaaaggaacagacgggctctgatgacgaagatgagtcgagtgagcagacctttatgtattatgtgaatgatggcgtctatggatcatttaattgcatactctatgaccacgcacatgtaaagccccttctgcaaaagagacctaaaccagatgagaagtattattcatccagcatatggggaccaacatgtgatggcctcgatcggattgttgagcgctgtgacctgcctgaaatgcatgtgggtgattggatgctctttgaaaacatgggcgcttacactgttgctgctgcctctacgttcaatggcttccagaggccgacgatctactatgtgatgtcagggcctgcgtggcaactcatgcagcaattccagaaccccgacttcccacccgaagtagaggaacaggatgccagcaccctgcctgtgtcttgtgcctgggagagtgggatgaaacgccacagagcagcctgtgcttcggctagtattaatgtgtagatagcactctggtagctgttaactgcaagtttagcttgaattaagggatttggggggaccatgtaacttaattactgctagttttgaaatgtctttgtaagagtagggtcgccatgatgcagccatatggaagactaggatatgggtcacacttatctgtgttcctatggaaactatttgaatatttgttttatatggatttttattcactcttcagacacgctactcaagagtgcccctcagctgctgaacaagcatttgtagcttgtacaatggcagaatgggccaaaagcttagtgttgtgacctgtttttaaaataaagtatcttgaaataattaggc

SEQ ID NO: 61 - DNA, 477 bp, Homo sapiens
  gene (1)..(477): Accession No. NM_020427
ctctcatcacttctgagcacggagcaatggcctctcgctgggctgtgcagctgctgctcgtggcagcctggagcatgggctgtggtgaggccctcaagtgctacacctgcaaggagcccatgaccagtgcttcctgcaggaccattacccgctgcaagccagaggacacagcctgcatgacctgctccagctcctgtgtggccaccgaccccgacagcatcggggccgcccacctgatcttctgctgcttccgagacctctgcaactcggaactctgaacccagggcggcagggcggaaggtgctcctcaggcacctcctctctgacggggcctggctccacctgtgatcacctccccctgcttcctgctgctgtggcacagctcactcatggggtctgaggggagagaagcacaccaggggcgccctctgccttccataccccacgcttataaaacataactaagccaagagtgga

SEQ ID NO: 62 - DNA, 4066 bp, Homo sapiens
  gene (1)..(4066): Accession No. NM_139035
gcggagtgattccccacccctgctccatctagctctttccagtgcagccactgccgccgcccaggagccctcgtcccctgccttgtccccctactcgttcccgctcccacggcatggagcaggacactgccgcagtggcagccaccgtggcagccgcggatgcgaccgccactatcgtggtcatagaggacgagcagcccgggccgtccacctctcaggaggagggagcggccgccgcggccaccgaagccaccgcggccacggagaagggcgagaagaagaaggagaaaaacgtttcttcatttcaactcaaacttgctgctaaagcgcctaaatctgaaaaggaaatggacccagaatatgaagagaaaatgaaagccgaccgagcaaagagatttgaatttttactgaagcagacagaactttttgcacatttcattcagccttcagcacagaaatctccaacatctccactgaacatgaaattgggacgtccccgaataaagaaagatgaaaagcagagcttaatttctgctggagactaccgccataggcgcacagagcaagaagaagatgaagagctactgtctgagagtcggaaaacatctaatgtgtgtattagatttgaggtgtcaccttcatatgtgaaaggggggccactgagagattatcagattcgaggactgaattggttgatctctttatatgaaaatggagtcaatggcattttggctgatgaaatgggccttgggaaaactttacaaacaattgctttgcttggttacctgaaacactaccgaaatattcctggacctcacatggttttagttccaaagtctactttacacaactggatgaatgaatttaaacgatgggtcccatctctccgtgtcatttgttttgtcggagacaaggatgccagagctgcttttattcgtgatgaaatgatgccaggagagtgggatgtttgcgttacttcttatgagatggtaattaaagaaaaatctgtattcaaaaagtttcactggcgatacctggtcattgatgaagctcacagaataaagaatgaaaaatctaagctttcagagattgttcgtgagttcaagtcgactaaccgcttgctcctaactggaacacctttgcagaataacctgcatgaactgtgggccttactcaactttttattgcctgatgtctttaattctgcagatgactttgattcttggtttgacactaaaaattgtcttggtgatcaaaaactcgtggaaagacttcatgcagttttaaaaccatttttgttacgccgtataaaaactgatgtagagaagagtctgccacctaaaaaggaaataaagatttacttggggctgagtaagatgcaacgagaatggtatacaaaaatcctgatgaaagatattgatgttttaaactcttctggcaagatggacaagatgcgactcttaaacattctgatgcagcttcgaaagtgttgtaatcatccatatctgtttgatggtgctgaacctggtccaccttataccactgatgagcatattgtcagcaacagtggtaaaatggtagttctggataaactattggccaaactcaaagaacagggttcaagggttctcattttcagccagatgactcgcttgctggatattttggaagattattgcatgtggcgtggttatgagtattgtcgactggatggacaaaccccgcatgaagaaagagaggaagcaatagaggcttttaatgctcctaatagtagcaaattcatctttatgctaagtaccagggctggaggtctcggaattaacctggcaagtgctgatgtggttatactatatgattcagactggaacccacaggttgatctacaagctatggatcgagcacatcgtattggtcagaagaaaccagtacgtgtattccgtctcatcactgacaacactgttgaagagaggattgtagaaagagctgagataaaactgagactcgattcaattgttatacaacaaggaagactcattgaccaacagtctaacaagctggcaaaagaggaaatgttacaaatgatacggcatggagccacccatgtttttgcttctaaagagagtgagttgacagatgaagacattacaactattctggaaagaggggaaaagaagactgcagagatgaatgaacgcctgcaaaaaatgggagagtcttctctaagaaattttagaatggacattgaacaaagtttatacaaatttgagggagaagattatagagaaaaacagaagcttggcatggtggaatggattgaacctcctaaacgagaacgcaaagcaaactacgcagtggatgcctactttagagaggctttgcgtgtcagcgagccaaagattccaaaggctccacggcctccaaaacagccaaatgttcaggattttcaatttttcccaccacgcttatttgagctcctggaaaaggaaattctttattatcggaagacaataggctataaggttccaaggaatcctgatatcccaaatccagctctggctcaaagagaagagcaaaaaaagattgatggagctgaacctcttacaccagaagagactgaagaaaaggaaaaacttctcacacaaggtttcacaaactggactaaacgagattttaaccagtttattaaagctaatgagaaatatggaagagatgacattgataacatagctcgagaggtagagggcaaatcccctgaggaggtcatggagtattcagctgtattttgggaacgttgcaatgaattacaggacattgagaaaattatggctcaaattgaacgtggagaagcaagaattcaacgaaggatcagtatcaagaaagccctggatgccaaaattgcaagatacaaggctccatttcatcagttgcgcattcagtatggaaccagcaaaggaaagaactatactgaggaagaagatagattcttgatttgtatgttacacaaaatgggctttgatagagaaaatgtatatgaagaattaagacagtgtgtacgaaatgctccccagtttagatttgactggtttatcaagtctaggactgccatggaattccagagacgctgtaacactctgatttcattgattgagaaagaaaatatggaaattgaggaaagagagagagcagaaaagaagaaacgggcaactaaaactccaatggtaaaattttcagcattttcctaacttttagatttaacattgttgggccatttaaaatgtgcatattggagcagaacattaaatctgtttccattttagtcacagaaaagaaaagcagagtcagctactgagagctctggaaagaaggatgtcaagaaggtgaaatcctaaagcctagaaataaagttttaaatgggaaactgctattttcttgttcccatcttcaaatgctaattgccagttccagtgtattcatggtactctaagaaaaatctctttggttttgatttcttgcatattttatatattttacaatgctttctacctgaaatgtgtagctttatattttatggcattctagtatttttgtgtactgtattttgtgcatttcatgtcttcatcaaaatcctctcagtccttgttcttttgaagcttgtgctgaggttttagcttttctatgttttatatgccgctgctttgaaagagaacctagattctatagttgtattattgttgtttcatactttaaatttatatggctgtggaaaaacgaattaaaatgttttgaggagaaagactttttcacttctttgttgctttcttttctattgagtctgggcttgtttgtgttactgcatactgtgattagcataataattgtttctttgaggtcatctaaatatttttttcctaaaggaataaagggtgaggaaagaaaaatattaaaaaagctaatatttgatactgtgcttgctgtcagtatgcattacatttaaattattctctattcaagtgggaaaatataataaagaaatgtctataagaaatttaaaaaaaaaaaaaaaaaa

SEQ ID NO: 63 - DNA, 8320 bp, Homo sapiens
  gene (1)..(8320): Accession No. NM_003199
gtgtgtggatgtgtgagtgagagggaacgagagtaagagaaagaaagaagtgaggggatgtaaactcgaataaatttcaaagtgcctccgagggatgcaacgggcaaaaactgaactgttcaggcttcagattgtaactgacgatctgaggaaaaatgaggtgctcgatgaattttcgtttgtattttttggcgaggcgggggaggtgttgagattttttttttttcccctcggggtgggtgcgagggggatgcatcctagcctgcccgacccggagcaagtcgcgtctccccgccggagcccccccacccatttctttgctgaacttgcaattccgtgcgcctcggcgtgtttccccctccccccttccctccgtcccctcccctccccggagaagagagttggtgttaagagtcagggatcttggctgtgtgtctgcggatctgtagtggcggcggcggcggcggcggcggggaggcagcaggcgcgggagcgggcgcaggagcaggcggcggcggtggcggcggcggttagacatgaacgccgcctcggcgccggcggtgcacggagagccccttctcgcgcgcgggcggtttgtgtgattttgctaaaatgcatcaccaacagcgaatggctgccttagggacggacaaagagctgagtgatttactggatttcagtgcgatgttttcacctcctgtgagcagtgggaaaaatggaccaacttctttggcaagtggacattttactggctcaaatgtagaagacagaagtagctcagggtcctgggggaatggaggacatccaagcccgtccaggaactatggagatgggactccctatgaccacatgaccagcagggaccttgggtcacatgacaatctctctccaccttttgtcaattccagaatacaaagtaaaacagaaaggggctcatactcatcttatgggagagaatcaaacttacagggttgccaccagcagagtctccttggaggtgacatggatatgggcaacccaggaaccctttcgcccaccaaacctggttcccagtactatcagtattctagcaataatccccgaaggaggcctcttcacagtagtgccatggaggtacagacaaagaaagttcgaaaagttcctccaggtttgccatcttcagtctatgctccatcagcaagcactgccgactacaatagggactcgccaggctatccttcctccaaaccagcaaccagcactttccctagctccttcttcatgcaagatggccatcacagcagtgacccttggagctcctccagtgggatgaatcagcctggctatgcaggaatgttgggcaactcttctcatattccacagtccagcagctactgtagcctgcatccacatgaacgtttgagctatccatcacactcctcagcagacatcaattccagtcttcctccgatgtccactttccatcgtagtggtacaaaccattacagcacctcttcctgtacgcctcctgccaacgggacagacagtataatggcaaatagaggaagcggggcagccggcagctcccagactggagatgctctggggaaagcacttgcttcgatctattctccagatcacactaacaacagcttttcatcaaacccttcaactcctgttggctctcctccatctctctcagcaggcacagctgtttggtctagaaatggaggacaggcctcatcgtctcctaattatgaaggacccttacactctttgcaaagccgaattgaagatcgtttagaaagactggatgatgctattcatgttctccggaaccatgcagtgggcccatccacagctatgcctggtggtcatggggacatgcatggaatcattggaccttctcataatggagccatgggtggtctgggctcagggtatggaaccggccttctttcagccaacagacattcactcatggtggggacccatcgtgaagatggcgtggccctgagaggcagccattctcttctgccaaaccaggttccggttccacagcttcctgtccagtctgcgacttcccctgacctgaacccaccccaggacccttacagaggcatgccaccaggactacaggggcagagtgtctcctctggcagctctgagatcaaatccgatgacgagggtgatgagaacctgcaagacacgaaatcttcggaggacaagaaattagatgacgacaagaaggatatcaaatcaattactagcaataatgacgatgaggacctgacaccagagcagaaggcagagcgtgagaaggagcggaggatggccaacaatgcccgagagcgtctgcgggtccgtgacatcaacgaggctttcaaagagctcggccgcatggtgcagctccacctcaagagtgacaagccccagaccaagctcctgatcctccaccaggcggtggccgtcatcctcagtctggagcagcaagtccgagaaaggaatctgaatccgaaagctgcgtgtctgaaaagaagggaggaagagaaggtgtcctcagagcctccccctctctccttggccggcccacaccctggaatgggagacgcatcgaatcacatgggacagatgtaaaagggtccaagttgccacattgcttcattaaaacaagagaccacttccttaacagctgtattatcttaaacccacataaacacttctccttaacccccatttttgtaatataagacaagtctgagtagttatgaatcgcagacgcaagaggtttcagcattcccaattatcaaaaaacagaaaaacaaaaaaaagaaagaaaaaagtgcaacttgagggacgactttctttaacatatcattcagaatgtgcaaagcagtatgtacaggctgagacacagcccagagactgaacggcaatctttccacactgtggaacaatgcatttgtgcctaaacttcttttggaaaaaaaaaatataattaatttgtaagtctgaaaaaaaaatatttaatttaaaaaaaattgtaaacttgcaataatgaaaaagtgtacttctgaagaaaactacatgaacgtttttgttggtattcaagtcagctagtgtttataattactggatattgaattaggggaagctcggctgccctagtaacaaaaccagcaaacgtcctgatgacaacgaagtgatgacattagccattccttagggtaggaggaacagatggatcttatagacctatgacaaatatatatataaatatatatataaatatatattaaaaatttagtgactatggtaagcttttgttcatttgtttcagacttttttctcctgtaaaaaaatagtactgattaacttttttaaaagaaagattttactgtaaatatggatttttttttttttggtcttatttctgtccctttccctggtttgttatcgtaacctgtagtgccaactctgcttccagaggggtagtgcaggatgaaatgctgaccctgatgttgcttctcattcataaataagtagaaagttgtttctccagtcttttgggaacacaggacttaaaagtcacatcatgtgtagatattacaagcagcattaccaagacatggcaaaaagagtttgtctgaattgtaatgttgcgtttgtgaacctattctgggattttcagaggtacaaggttagaatgctacaatgttaccactgtgccttccaatgtttatatcatcggaaacataacataatcaaagtggctgtgatttaacaaaatgattaaagtgttacctacctgtgtagccgaagtagtgtgcagtgaggcgtttctgaatacatggtcagatttttggaaaaaaacaaaaacaaaaaaaacaagtaaagttcaaaaaccgtcaaatgagaaaattgcaagtagtgtgacagagctgattgattttgttgctttcttgattttttttttcaaaatgggtttactaaaatgtagatgacttaactgcctcctccttcgtctgaaaaatgccaatattcaatcatcatgcagcattataacaagccttataagtcctaaagcattaagttgcacttttttgaggaggggtagtgcagtatttctctggccagtatgaatgaagtttatacttaccatatttgatagaaacatagatcaagctatggcacagcgactcatcagatagctagctttgacgtctgggcacaattgaaccaacttccatcgtgaatctttataatgattgactttggtgtatagtgcagtaaacaaatagtgctcctagttaagtatttgtcagcatccttttgtctctaacttgtttctatttttacagccacacaattcttggcatgtattaagaaaaaaaaaaatccctgttcaagtagtttttccacctatcagcactgagtaaatgccataaatccattgaaatggtctaaatgttccatctgttctcctgttttgccagttatatagtaatgaaatacatttgtaaattttatgcaacaaatggcaaacgtatcattattttgaaattgtgtatgtaaaagttatatttttacatgtagactcttgttattatgtgttttaatacattgtatcagtttttgtttttttttaaaaactgtggtttaaaaagaagtctcatttaaatgaaatagctacaagaatcagaattttatgttcatttctgaaaatgtaagaacaaataagatagttaccacgtggtcatcttttacaaacccataaacattttgattagctgtgtgtgtgttgaaaaactgtaaatatgttcagtagcgataaaactaaaataactttgatttgttgataagttcctaaaatgtggaggtggattaaaaccttaggagaatagcagaaatcaaacttcatgaaaagttattttggggctttcctgtgaaatgtatgaacaaagaggctcagagaaggacatggaagacaataatgtatactctctcctcctccctgaataatgaaaaccatgtgtatttgttccctccgtatgttaaagatttccttttagtggtacattctgcactcattttgtatagtctaccaaggcgggtatccctaggaacaatattatataggaagcaggtatactctgatcacattcaggataagtgtacagaagaaaatacggtgtttactctttagggaactggaaacactccctgcattgatgtacattttaagaatggcacttttgatacatgttatcataaaggtgcttaatagagctgaattaaagtttttcaaatctgtaaacaaagcaaaaaagtaaattgtagtcatttgattattttttaaattggtgctttatattttgttctcactcagagtaaaagctgcaatttattgttcaccagctttgatgtattcattactcagtaatgcaatacctctattgttgaattccctttggaaataagtgaaaattctaacggccactgaaagctgctcgctaggttttgcttggtggagaaacataatctgcacctatccatattaattgggttgtatccccattaaaaaagaaaaaaagggaatgtggcctttttagtgtgttttttattgttgttgttttgtaattatcaaacccaggtaagatattggtatcctgcactggattttcaaatgaagttcagcagaagacagttaagattaaagtactatacaaaaatttcaaaagggtccatactacgctatctgtatgacgacacttaggctggggatctctttcagaaactcggactttaaaagcaacttggagcagttgatccacctccacattcaagtaatttatgaatatgcagaatagggatctgttcatctagaaatttttaccatttgtcttctgtgtagctgcaaggaacactaatgtttatacaactgtcagtccacccagtggtgcaactggttctgattcagtcttccgattcctttttatttttcactttttcctatttctgaatttttttttttatttgtgatcttgattttgatgaggggttggggagtggggagggagtcgaaccaagacttggagttaagaggattttcatcttttgcatccaacaggcagaatatgatctgtgtccaaaagtgaacttgagtcaggaatgaatcaatttcagcataaacaagcacaaaaatttagtctgctggctgactggaagcaaaaaagtcaagatggaatatgatgaattccaacacaatggggcaccaaggcctttaggcctctctttttattttgctttggttttgtttgtttttctttagagacatgctctttctcatgggacttgaagtggactcatctttgtgcagtgctggttttgccatactcatttcaagtattatagacatatgtaatggtgaaaatatatgaactgtggcctttttcattcttgttacttgtgatgcaattaagtgaagataagaaaaaaaaaaaaaaagcagagatttaccatgtatcagtgcctggctttttgttataaagctttgtttgtctagtgctcttttgctataaaatagactgtagtacaccctagtaggaaaaaaaaaaaactaaatttaaaaataaaaaatatatttggcttatttttcgcaggagcaatccttttataccatgaatattacaaaaaaattgtcagattctgaatatttcttctttgtagatttttggaatcattatgagtaaaagtttgttactttattttactatttaaaagatgttattttaccatgtgttaccaagatgaaactgtatgggtagcttttttgtttgttttttgttttgtttttgtttttgtttttgtttttagttgtaggtcgcagcggggaaattttttgcgactgtacacatagctgcagcattaaaaacttaaaaaaattgttaaaaaaaaaaaaagggaaaacatttcaaaaaaaaaaaaaaagataaacagttacaccttgttttcaatgtgtggctgagtgcctcgattttttcatgtttttggtgtatttctgatttgtagaagtgtccaaacaggttgtgtgctggagttccttcaagacaaaaacaaacccagcttggtcaaggccattacctgtttcccatctgtagttattcgatgaagtcatgtacatgaccgttctgtagcaataaatgtgccatttttataaactgtttctgacacttgtttcatttcattttgcattgtccatatagctatgattctcttctgtaagtaaaacgcatctatatttcattttccaagtgttggaggtattgacagcttaacaaacaaaacatacaaaaaaaatcacaaaaacaaattgaaaagcaaagcacatgattgatcaaggaagagatgcccttaatgaaaatggaacgggatgcatgcaaaacaaaaagaaaactgtctagaggattaactaattgaaggaatataattaatgtgtgtgtaacactgaagctatgcatttgaagagctctgaactgcaccagtgttttcggttgtgctgcaggttgctaagtcaagtcagccttaaccttttgcaccagttggtcggctgtttggcagaacattctcagatcttttcagtcaaaaatctaagatgatttattttgtatcactttgttaaaagctgaatattgttaactacagttaatattaacactgtatttatactttctcaaactacatccgccccaccacttctggttgcctctgttgactattaatccagatgtaaacaaccagatgtttttttctaacttgtacaaactgacgtgtgtcaactatcatggaaggaaaaaaatgtacagattaaaattattcagtgttatgtactgtaagttaatatttttgtagaatggacatcaatctactttgcaaaatttggaggctatttcaacattgcactgtagaaatgtaaagtaatgtatgcaatgtaaaggaaagcccgcggtagctgagcgcttcataacagaatgttctaatcaagtacgtggtatttggggatgtctccaatattgctcttgtattctttctaattgggtttagtgactagttgaaggaaaatgttataacgccatttggttcacatgtgaagtgccctccatagccaaatgttgggatttttttttttttcgtttttggttggactgtttgcagatatttaaattttatgaaatttccaaagattttggttgataacccccttttaccttctaaatgatttgagatgttcttatgttcttactgtgtgttttaaatatatataaaagagccacaagcattt

SEQ ID NO: 64 - DNA, 6475 bp, Homo sapiens
  gene (1)..(6475): Accession No. NM_004612
ggcgaggcgaggtttgctggggtgaggcagcggcgcggccgggccgggccgggccacaggcggtggcggcgggaccatggaggcggcggtcgctgctccgcgtccccggctgctcctcctcgtgctggcggcggcggcggcggcggcggcggcgctgctcccgggggcgacggcgttacagtgtttctgccacctctgtacaaaagacaattttacttgtgtgacagatgggctctgctttgtctctgtcacagagaccacagacaaagttatacacaacagcatgtgtatagctgaaattgacttaattcctcgagataggccgtttgtatgtgcaccctcttcaaaaactgggtctgtgactacaacatattgctgcaatcaggaccattgcaataaaatagaacttccaactactgtaaagtcatcacctggccttggtcctgtggaactggcagctgtcattgctggaccagtgtgcttcgtctgcatctcactcatgttgatggtctatatctgccacaaccgcactgtcattcaccatcgagtgccaaatgaagaggacccttcattagatcgcccttttatttcagagggtactacgttgaaagacttaatttatgatatgacaacgtcaggttctggctcaggtttaccattgcttgttcagagaacaattgcgagaactattgtgttacaagaaagcattggcaaaggtcgatttggagaagtttggagaggaaagtggcggggagaagaagttgctgttaagatattctcctctagagaagaacgttcgtggttccgtgaggcagagatttatcaaactgtaatgttacgtcatgaaaacatcctgggatttatagcagcagacaataaagacaatggtacttggactcagctctggttggtgtcagattatcatgagcatggatccctttttgattacttaaacagatacacagttactgtggaaggaatgataaaacttgctctgtccacggcgagcggtcttgcccatcttcacatggagattgttggtacccaaggaaagccagccattgctcatagagatttgaaatcaaagaatatcttggtaaagaagaatggaacttgctgtattgcagacttaggactggcagtaagacatgattcagccacagataccattgatattgctccaaaccacagagtgggaacaaaaaggtacatggcccctgaagttctcgatgattccataaatatgaaacattttgaatccttcaaacgtgctgacatctatgcaatgggcttagtattctgggaaattgctcgacgatgttccattggtggaattcatgaagattaccaactgccttattatgatcttgtaccttctgacccatcagttgaagaaatgagaaaagttgtttgtgaacagaagttaaggccaaatatcccaaacagatggcagagctgtgaagccttgagagtaatggctaaaattatgagagaatgttggtatgccaatggagcagctaggcttacagcattgcggattaagaaaacattatcgcaactcagtcaacaggaaggcatcaaaatgtaattctacagctttgcctgaactctccttttttcttcagatctgctcctgggttttaatttgggaggtcaattgttctacctcactgagagggaacagaaggatattgcttccttttgcagcagtgtaataaagtcaattaaaaacttcccaggatttctttggacccaggaaacagccatgtgggtcctttctgtgcactatgaacgcttctttcccaggacagaaaatgtgtagtctacctttattttttattaacaaaacttgttttttaaaaagatgattgctggtcttaactttaggtaactctgctgtgctggagatcatctttaagggcaaaggagttggattgctgaattacaatgaaacatgtcttattactaaagaaagtgatttactcctggttagtacattctcagaggattctgaaccactagagtttccttgattcagactttgaatgtactgttctatagtttttcaggatcttaaaactaacacttataaaactcttatcttgagtctaaaaatgacctcatatagtagtgaggaacataattcatgcaattgtattttgtatactattattgttctttcacttattcagaacattacatgccttcaaaatgggattgtactataccagtaagtgccacttctgtgtctttctaatggaaatgagtagaattgctgaaagtctctatgttaaaacctatagtgtttgaattcaaaaagcttatttatctgggtaacccaaactttttctgttttgtttttggaagggtttttgtggtatgtcatttggtattctattctgaaaatgcctttctcctaccaaaatgtgcttaagccactaaagaaatgaagtggcattaattagtaaattattagcatggtcatgtttgaatattctcacatcaagcttttgcattttaattgtgttgtctaagtatacttttaaaaaatcaagtggcactctagatgcttatagtactttaatatttgtagcatacagactaatttttctaaaagggaaagtctgtctagctgcttgtgaaaagttatgtggtattctgtaagccatttttttctttatctgttcaaagacttattttttaagacatgaattacatttaaaattagaatatggttaatattaaataataggcctttttctaggaaggcgaaggtagttaataatttgaatagataacagatgtgcaagaaagtcacatttgttatgtatgtaggagtaaacgttcggtggatcctctgtctttgtaactgaggttagagctagtgtggttttgaggtctcactacactttgaggaaggcagcttttaattcagtgtttccttatgtgtgcgtacattgcaactgcttacatgtaatttatgtaatgcattcagtgcacccttgttacttgggagaggtggtagctaaagaacattctgagtataggtttttctccatttacagatgtctttggtcaaatattgaaagcaaacttgtcatggtcttcttacattaagttgaaactagcttataataactggtttttacttccaatgctatgaagtctctgcagggcttttacagttttcgaagtccttttatcactgtgatcttattctgaggggagaaaaaactatcatagctctgaggcaagacttcgactttatagtgctatcagttccccgatacagggtcagagtaacccatacagtattttggtcaggaagagaaagtggccatttacactgaatgagttgcattctgataatgtcttatctcttatacgtagaataaatttgaaagactatttgatcttaaaaccaaagtaattttagaatgagtgacatattacataggaatttagtgtcaatttcatgtgtttaaaaacatcatgggaaaaatgcttagaggttactattttgactacaaagttgagtttttttctgtagttaccataatttcattgaagcaaatgaatgagtttgagaggtttgtttttatagttgtgttgtattacttgtttaataataatctctaattctgtgatcaggtactttttttgtgggggttttttttttgtttttttttttttgttgttgtttttgggccatttctaagcctaccagatctgctttatgaaatccaggggaccaatgcattttatcactaaaactatttttatataattttaagaatataccaaaagttgtctgatttaaagttgtaatacatgatttctcactttcatgtaaggttatccacttttgctgaagatattttttattgaatcaaagattgagttacaattatacttttcttacctaagtggataaaatgtacttttgatgaatcagggaatttttttaaagttggagtttagttctaaattgactttacgtattactgcagttaattccttttttggctagggatggtttgataaaccacaattggctgatattgaaaatgaaagaaacttaaaaggtgggatggatcatgattactgtcgataactgcagataaatttgattagagtaataattttgtcatttaaaaacacagttgtttatactgcccatcctaggatgctcaccttccaagattcaacgtggctaaaacatcttctggtaaattgtgcgtccatattcattttgtcagtagccaggagaaatggggatgggggaaatacgacttagtgaggcatagacatccctggtccatcctttctgtctccagctgtttcttggaacctgctctcctgcttgctggtccctgacgcagagaccgttgcctcccccacagccgtttgactgaaggctgctctggagacctagagtaaaacggctgatggaagttgtgggacccacttccatttccttcagtcattagaggtggaagggaggggtctccaagtttggagattgagcagatgaggcttgggatgcccctgctttgacttcagccatggatgaggagtgggatggcagcaaggtggctcctgtggcagtggagttgtgccagaaacagtggccagttgtatcgcctataagacagggtaaggtctgaagagctgagcctgtaattctgctgtaataatgatagtgctcaagaagtgccttgagttggtgtacagtgccatggccatcaagaatcccagatttcaggttttattacaaaatgtaagtggtcacttggcgattttgtagtacatgcatgagttaccttttttctctatgtctgagaactgtcagattaaaacaagatggcaaagagatcgttagagtgcacaacaaaatcactatcccattagacacatcatcaaaagcttatttttattcttgcactggaagaatcgtaagtcaactgtttcttgaccatggcagtgttctggctccaaatggtagtgattccaaataatggttctgttaacactttggcagaaaatgccagctcagatattttgagatactaaggattatctttggacatgtactgcagcttcttgtctctgttttggattactggaatacccatgggccctctcaagagtgctggacttctaggacattaagatgattgtcagtacattaaacttttcaatcccattatgcaatcttgtttgtaaatgtaaacttctaaaaatatggttaataacattcaacctgtttattacaacttaaaaggaacttcagtgaatttgtttttattttttaacaagatttgtgaactgaatatcatgaaccatgttttgatacccctttttcacgttgtgccaacggaatagggtgtttgatatttcttcatatgttaaggagatgcttcaaaatgtcaattgctttaaacttaaattacctctcaagagaccaaggtacatttacctcattgtgtatataatgtttaatatttgtcagagcattctccaggtttgcagttttatttctataaagtatgggtattatgttgctcagttactcaaatggtactgtattgtttatatttgtaccccaaataacatcgtctgtactttctgttttctgtattgtatttgtgcaggattctttaggctttatcagtgtaatctctgccttttaagatatgtacagaaaatgtccatataaatttccattgaagtcgaatgatactgagaagcctgtaaagaggagaaaaaaacataagctgtgtttccccataagtttttttaaattgtatattgtatttgtagtaatattccaaaagaatgtaaataggaaatagaagagtgatgcttatgttaagtcctaacactacagtagaagaatggaagcagtgcaaataaattacatttttcccaagtgccagtggcatattttaaaataaagtgtatacgttggaatgagtcatgccatatgtagttgctgtagatggcaactagaacctttgagttacaagagtctttagaagttttctaaccctgcctagtgcaagttacaatattatagcgtgttcggggagtgccctcctgtctgcaggtgtgtctctgtgcctgggggcttttctccacatgcttaggggtgtgggtcttccattggggcatgatggacctgtctacaggtgatctctgttgcctttgggtcagcacatttgttagtctcctgggggtgaaaacttggcttacaagagaactggaaaaatgatgagatgtggtccccaaacccttgattgactctggggaggggctttgtgaataggattgctctcacattaaagatagttacttcaatttgaaggctggatttagggatttttttttttccttataacaaagacatcaccaggatatgaagcttttgttgaaagttggaaaaaaagtgaaattaaagacattcccagacaaa

SEQ ID NO: 65 - DNA, 2413 bp, Homo sapiens
  gene (1)..(2413): Accession No. NM_006288
tttggttttcccacagactcctgaagaataggtcagaagaaagggttaaagccttaaaaggggaacaaccattgcggggctcagggaggaggataatgttctttgggctgccgcaccctgatccccggggtcccgaaccctcccgtccctggccaggcctgccagccacagggtgagggcccccttccgccgcaacctgccactctcacaccaatgcgggaccgccttctcttccttccccaccccccaccccaccctgccgtcctttctcccccaatctccgcctctgattggctgagcccccggctccccgctccccctctcctccatccccggtgaaaactgcgggctccgagctgggtgcagcaaccggaggcggcggcgcgtctggaggaggctgcagcagcggaagaccccagtccagatccaggactgagatcccagaaccatgaacctggccatcagcatcgctctcctgctaacagtcttgcaggtctcccgagggcagaaggtgaccagcctaacggcctgcctagtggaccagagccttcgtctggactgccgccatgagaataccagcagttcacccatccagtacgagttcagcctgacccgtgagacaaagaagcacgtgctctttggcactgtgggggtgcctgagcacacataccgctcccgaaccaacttcaccagcaaatacaacatgaaggtcctctacttatccgccttcactagcaaggacgagggcacctacacgtgtgcactccaccactctggccattccccacccatctcctcccagaacgtcacagtgctcagagacaaactggtcaagtgtgagggcatcagcctgctggctcagaacacctcgtggctgctgctgctcctgctctccctctccctcctccaggccacggatttcatgtccctgtgactggtggggcccatggaggagacaggaagcctcaagttccagtgcagagatcctacttctctgagtcagctgaccccctccccccaatccctcaaaccttgaggagaagtggggaccccacccctcatcaggagttccagtgctgcatgcgattatctacccacgtccacgcggccacctcaccctctccgcacacctctggctgtctttttgtactttttgttccagagctgcttctgtctggtttatttaggttttatccttccttttctttgagagttcgtgaagagggaagccaggattggggacctgatggagagtgagagcatgtgaggggtagtgggatggtggggtaccagccactggaggggtcatccttgcccatcgggaccagaaacctgggagagacttggatgaggagtggttgggctgtgcctgggcctagcacggacatggtctgtcctgacagcactcctcggcaggcatggctggtgcctgaagaccccagatgtgagggcaccaccaagaatttgtggcctaccttgtgagggagagaactgagcatctccagcattctcagccacaaccaaaaaaaaataaaaagggcagccctccttaccactgtggaagtccctcagaggccttggggcatgacccagtgaagatgcaggtttgaccaggaaagcagcgctagtggagggttggagaaggaggtaaaggatgagggttcatcatccctccctgcctaaggaagctaaaagcatggccctgctgcccctccctgcctccacccacagtggagagggctacaaaggaggacaagaccctctcaggctgtcccaagctcccaagagcttccagagctctgacccacagcctccaagtcaggtggggtggagtcccagagctgcacagggtttggcccaagtttctaagggaggcacttcctcccctcgcccatcagtgccagcccctgctggctggtgcctgagcccctcagacagccccctgccccgcaggcctgccttctcagggacttctgcggggcctgaggcaagccatggagtgagacccaggagccggacacttctcaggaaatggcttttcccaacccccagcccccacccggtggttcttcctgttctgtgactgtgtatagtgccaccacagcttatggcatctcattgaggacaaagaaaactgcacaataaaaccaagcctctggaatctgtcctcgtgtccacctggccttcgctcctccagcagtgcctgcctgcccccgcttcgctggggtctccacgggtgaggctggggaacgccacctcttcctcttccctgacttctccccaaccacttagtagcaacgctaccccaggggctaatgactgcacactgggcttcttttcagaatgaccctaacgagacacatttgcccaaataaacgaacatcccatgtctgctgaaaaaaaaaaaaaaaaa

SEQ ID NO: 66 - DNA, 1669 bp, Homo sapiens
  gene (1)..(1669): Accession No. NM_000594
ctccctcagcaaggacagcagaggaccagctaagagggagagaagcaactacagaccccccctgaaaacaaccctcagacgccacatcccctgacaagctgccaggcaggttctcttcctctcacatactgacccacggctccaccctctctcccctggaaaggacaccatgagcactgaaagcatgatccgggacgtggagctggccgaggaggcgctccccaagaagacaggggggccccagggctccaggcggtgcttgttcctcagcctcttctccttcctgatcgtggcaggcgccaccacgctcttctgcctgctgcactttggagtgatcggcccccagagggaagagttccccagggacctctctctaatcagccctctggcccaggcagtcagatcatcttctcgaaccccgagtgacaagcctgtagcccatgttgtagcaaaccctcaagctgaggggcagctccagtggctgaaccgccgggccaatgccctcctggccaatggcgtggagctgagagataaccagctggtggtgccatcagagggcctgtacctcatctactcccaggtcctcttcaagggccaaggctgcccctccacccatgtgctcctcacccacaccatcagccgcatcgccgtctcctaccagaccaaggtcaacctcctctctgccatcaagagcccctgccagagggagaccccagagggggctgaggccaagccctggtatgagcccatctatctgggaggggtcttccagctggagaagggtgaccgactcagcgctgagatcaatcggcccgactatctcgactttgccgagtctgggcaggtctactttgggatcattgccctgtgaggaggacgaacatccaaccttcccaaacgcctcccctgccccaatccctttattaccccctccttcagacaccctcaacctcttctggctcaaaaagagaattgggggcttagggtcggaacccaagcttagaactttaagcaacaagaccaccacttcgaaacctgggattcaggaatgtgtggcctgcacagtgaagtgctggcaaccactaagaattcaaactggggcctccagaactcactggggcctacagctttgatccctgacatctggaatctggagaccagggagcctttggttctggccagaatgctgcaggacttgagaagacctcacctagaaattgacacaagtggaccttaggccttcctctctccagatgtttccagacttccttgagacacggagcccagccctccccatggagccagctccctctatttatgtttgcacttgtgattatttattatttatttattatttatttatttacagatgaatgtatttatttgggagaccggggtatcctgggggacccaatgtaggagctgccttggctcagacatgttttccgtgaaaacggagctgaacaataggctgttcccatgtagccccctggcctctgtgccttcttttgattatgttttttaaaatatttatctgattaagttgtctaaacaatgctgatttggtgaccaactgtcactcattgctgagcctctgctccccaggggagttgtgtctgtaatcgccctactattcagtggcgagaaataaagtttgcttagaaaagaa

SEQ ID NO: 67 - DNA, 2586 bp, Homo sapiens
  gene (1)..(2586): Accession No. NM_000546
gattggggttttcccctcccatgtgctcaagactggcgctaaaagttttgagcttctcaaaagtctagagccaccgtccagggagcaggtagctgctgggctccggggacactttgcgttcgggctgggagcgtgctttccacgacggtgacacgcttccctggattggcagccagactgccttccgggtcactgccatggaggagccgcagtcagatcctagcgtcgagccccctctgagtcaggaaacattttcagacctatggaaactacttcctgaaaacaacgttctgtcccccttgccgtcccaagcaatggatgatttgatgctgtccccggacgatattgaacaatggttcactgaagacccaggtccagatgaagctcccagaatgccagaggctgctccccccgtggcccctgcaccagcagctcctacaccggcggcccctgcaccagccccctcctggcccctgtcatcttctgtcccttcccagaaaacctaccagggcagctacggtttccgtctgggcttcttgcattctgggacagccaagtctgtgacttgcacgtactcccctgccctcaacaagatgttttgccaactggccaagacctgccctgtgcagctgtgggttgattccacacccccgcccggcacccgcgtccgcgccatggccatctacaagcagtcacagcacatgacggaggttgtgaggcgctgcccccaccatgagcgctgctcagatagcgatggtctggcccctcctcagcatcttatccgagtggaaggaaatttgcgtgtggagtatttggatgacagaaacacttttcgacatagtgtggtggtgccctatgagccgcctgaggttggctctgactgtaccaccatccactacaactacatgtgtaacagttcctgcatgggcggcatgaaccggaggcccatcctcaccatcatcacactggaagactccagtggtaatctactgggacggaacagctttgaggtgcgtgtttgtgcctgtcctgggagagaccggcgcacagaggaagagaatctccgcaagaaaggggagcctcaccacgagctgcccccagggagcactaagcgagcactgcccaacaacaccagctcctctccccagccaaagaagaaaccactggatggagaatatttcacccttcagatccgtgggcgtgagcgcttcgagatgttccgagagctgaatgaggccttggaactcaaggatgcccaggctgggaaggagccaggggggagcagggctcactccagccacctgaagtccaaaaagggtcagtctacctcccgccataaaaaactcatgttcaagacagaagggcctgactcagactgacattctccacttcttgttccccactgacagcctcccacccccatctctccctcccctgccattttgggttttgggtctttgaacccttgcttgcaataggtgtgcgtcagaagcacccaggacttccatttgctttgtcccggggctccactgaacaagttggcctgcactggtgttttgttgtggggaggaggatggggagtaggacataccagcttagattttaaggtttttactgtgagggatgtttgggagatgtaagaaatgttcttgcagttaagggttagtttacaatcagccacattctaggtaggggcccacttcaccgtactaaccagggaagctgtccctcactgttgaattttctctaacttcaaggcccatatctgtgaaatgctggcatttgcacctacctcacagagtgcattgtgagggttaatgaaataatgtacatctggccttgaaaccaccttttattacatggggtctagaacttgacccccttgagggtgcttgttccctctccctgttggtcggtgggttggtagtttctacagttgggcagctggttaggtagagggagttgtcaagtctctgctggcccagccaaaccctgtctgacaacctcttggtgaaccttagtacctaaaaggaaatctcaccccatcccacaccctggaggatttcatctcttgtatatgatgatctggatccaccaagacttgttttatgctcagggtcaatttcttttttcttttttttttttttttttctttttctttgagactgggtctcgctttgttgcccaggctggagtggagtggcgtgatcttggcttactgcagcctttgcctccccggctcgagcagtcctgcctcagcctccggagtagctgggaccacaggttcatgccaccatggccagccaacttttgcatgttttgtagagatggggtctcacagtgttgcccaggctggtctcaaactcctgggctcaggcgatccacctgtctcagcctcccagagtgctgggattacaattgtgagccaccacgtccagctggaagggtcaacatcttttacattctgcaagcacatctgcattttcaccccacccttcccctccttctccctttttatatcccatttttatatcgatctcttattttacaataaaactttgctgccacctgtgtgtctgaggggtg

SEQ ID NO: 68 - DNA, 3614 bp, Homo sapiens
  gene (1)..(3614): Accession No. NM_003376
ggcttggggcagccgggtagctcggaggtcgtggcgctgggggctagcaccagcgctctgtcgggaggcgcagcggttaggtggaccggtcagcggactcaccggccagggcgctcggtgctggaatttgatattcattgatccgggttttatccctcttcttttttcttaaacatttttttttaaaactgtattgtttctcgttttaatttatttttgcttgccattccccacttgaatcgggccgacggcttggggagattgctctacttccccaaatcactgtggattttggaaaccagcagaaagaggaaagaggtagcaagagctccagagagaagtcgaggaagagagagacggggtcagagagagcgcgcgggcgtgcgagcagcgaaagcgacaggggcaaagtgagtgacctgcttttgggggtgaccgccggagcgcggcgtgagccctcccccttgggatcccgcagctgaccagtcgcgctgacggacagacagacagacaccgcccccagccccagctaccacctcctccccggccggcggcggacagtggacgcggcggcgagccgcgggcaggggccggagcccgcgcccggaggcggggtggagggggtcggggctcgcggcgtcgcactgaaacttttcgtccaacttctgggctgttctcgcttcggaggagccgtggtccgcgcgggggaagccgagccgagcggagccgcgagaagtgctagctcgggccgggaggagccgcagccggaggagggggaggaggaagaagagaaggaagaggagagggggccgcagtggcgactcggcgctcggaagccgggctcatggacgggtgaggcggcggtgtgcgcagacagtgctccagccgcgcgcgctccccaggccctggcccgggcctcgggccggggaggaagagtagctcgccgaggcgccgaggagagcgggccgccccacagcccgagccggagagggagcgcgagccgcgccggccccggtcgggcctccgaaaccatgaactttctgctgtcttgggtgcattggagccttgccttgctgctctacctccaccatgccaagtggtcccaggctgcacccatggcagaaggaggagggcagaatcatcacgaagtggtgaagttcatggatgtctatcagcgcagctactgccatccaatcgagaccctggtggacatcttccaggagtaccctgatgagatcgagtacatcttcaagccatcctgtgtgcccctgatgcgatgcgggggctgctgcaatgacgagggcctggagtgtgtgcccactgaggagtccaacatcaccatgcagattatgcggatcaaacctcaccaaggccagcacataggagagatgagcttcctacagcacaacaaatgtgaatgcagaccaaagaaagatagagcaagacaagaaaaaaaatcagttcgaggaaagggaaaggggcaaaaacgaaagcgcaagaaatcccggtataagtcctggagcgttccctgtgggccttgctcagagcggagaaagcatttgtttgtacaagatccgcagacgtgtaaatgttcctgcaaaaacacagactcgcgttgcaaggcgaggcagcttgagttaaacgaacgtacttgcagatgtgacaagccgaggcggtgagccgggcaggaggaaggagcctccctcagggtttcgggaaccagatctctcaccaggaaagactgatacagaacgatcgatacagaaaccacgctgccgccaccacaccatcaccatcgacagaacagtccttaatccagaaacctgaaatgaaggaagaggagactctgcgcagagcactttgggtccggagggcgagactccggcggaagcattcccgggcgggtgacccagcacggtccctcttggaattggattcgccattttatttttcttgctgctaaatcaccgagcccggaagattagagagttttatttctgggattcctgtagacacacccacccacatacatacatttatatatatatatattatatatatataaaaataaatatctctattttatatatataaaatatatatattctttttttaaattaacagtgctaatgttattggtgtcttcactggatgtatttgactgctgtggacttgagttgggaggggaatgttcccactcagatcctgacagggaagaggaggagatgagagactctggcatgatcttttttttgtcccacttggtggggccagggtcctctcccctgcccaggaatgtgcaaggccagggcatgggggcaaatatgacccagttttgggaacaccgacaaacccagccctggcgctgagcctctctaccccaggtcagacggacagaaagacagatcacaggtacagggatgaggacaccggctctgaccaggagtttggggagcttcaggacattgctgtgctttggggattccctccacatgctgcacgcgcatctcgcccccaggggcactgcctggaagattcaggagcctgggcggccttcgcttactctcacctgcttctgagttgcccaggagaccactggcagatgtcccggcgaagagaagagacacattgttggaagaagcagcccatgacagctccccttcctgggactcgccctcatcctcttcctgctccccttcctggggtgcagcctaaaaggacctatgtcctcacaccattgaaaccactagttctgtccccccaggagacctggttgtgtgtgtgtgagtggttgaccttcctccatcccctggtccttcccttcccttcccgaggcacagagagacagggcaggatccacgtgcccattgtggaggcagagaaaagagaaagtgttttatatacggtacttatttaatatccctttttaattagaaattaaaacagttaatttaattaaagagtagggttttttttcagtattcttggttaatatttaatttcaactatttatgagatgtatcttttgctctctcttgctctcttatttgtaccggtttttgtatataaaattcatgtttccaatctctctctccctgatcggtgacagtcactagcttatcttgaacagatatttaattttgctaacactcagctctgccctccccgatcccctggctccccagcacacattcctttgaaataaggtttcaatatacatctacatactatatatatatttggcaacttgtatttgtgtgtatatatatatatatatgtttatgtatatatgtgattctgataaaatagacattgctattctgttttttatatgtaaaaacaaaacaagaaaaaatagagaattctacatactaaatctctctccttttttaattttaatatttgttatcatttatttattggtgctactgtttatccgtaataattgtggggaaaagatattaacatcacgtctttgtctctagtgcagtttttcgagatattccgtagtacatatttatttttaaacaacgacaaagaaatacagatatatcttaaaaaaaaaaaagcattttgtattaaagaatttaattctgatctcaaaaaaaaaaaaa

SEQ ID NO: 69 - DNA, 2759 bp, Homo sapiens
  gene (1)..(2759): Accession No. NM_007127
agcttgccacaattccctgagatctcccaggtggcagctgcctccccaagacaggctcactcaccatgaccaagctgagcgcccaagtcaaaggctctctcaacatcaccaccccggggctgcagatatggaggatcgaggccatgcagatggtgcctgttccttccagcacctttggaagcttcttcgatggtgactgctacatcatcctggctatccacaagacagccagcagcctgtcctatgacatccactactggattggccaggactcatccctggatgagcagggggcagctgccatctacaccacacagatggatgacttcctgaagggccgggctgtgcagcaccgcgaggtccagggcaacgagagcgaggccttccgaggctacttcaagcaaggccttgtgatccggaaagggggcgtggcttctggcatgaagcacgtggagaccaactcctatgacgtccagaggctgctgcatgtcaagggcaagaggaacgtggtagctggagaggtagagatgtcctggaagagtttcaaccgaggggatgttttcctcctggaccttgggaagcttatcatccagtggaatggaccggaaagcacccgtatggagagactcaggggcatgactctggccaaggagatccgagaccaggagcggggagggcgcacctatgtaggcgtggtggacggagagaatgaattggcatccccgaagctgatggaggtgatgaaccacgtgctgggcaagcgcagggagctgaaggcggccgtgcccgacacggtggtggagccggcactcaaggctgcactcaaactgtaccatgtgtctgactccgaggggaatctggtggtgagggaagtcgccacacggccactgacacaggacctgctcagtcacgaggactgttacatcctggaccaggggggcctgaagatctacgtgtggaaagggaagaaagccaatgagcaggagaagaagggagccatgagccatgcgctgaacttcatcaaagccaagcagtacccaccaagcacacaggtggaggtgcagaatgatggggctgagtcggccgtctttcagcagctcttccagaagtggacagcgtccaaccggacctcaggcctaggcaaaacccacactgtgggctccgtggccaaagtggaacaggtgaagttcgatgccacatccatgcatgtcaagcctcaggtggctgcccagcagaagatggtagatgatgggagtggggaagtgcaggtgtggcgcattgagaacctagagctggtacctgtggattccaagtggctaggccacttctatgggggcgactgctacctgctgctctacacctacctcatcggcgagaagcagcattacctgctctacgtttggcagggcagccaggccagccaagatgaaattacagcatcagcttatcaagccgtcatcctggaccagaagtacaatggtgaaccagtccagatccgggtcccaatgggcaaggagccacctcatcttatgtccatcttcaagggacgcatggtggtctaccagggaggcacctcccgaactaacaacttggagaccgggccctccacacggctgttccaggtccagggaactggcgccaacaacaccaaggcctttgaggtcccagcgcgggccaatttcctcaattccaatgatgtctttgtcctcaagacccagtcttgctgctatctatggtgtgggaagggttgtagcggggacgagcgggagatggccaagatggttgctgacaccatctcccggacggagaagcaagtggtggtggaagggcaggagccagccaacttctggatggccctgggtgggaaggccccctatgccaacaccaagagactacaggaagaaaacctggtcatcaccccccggctctttgagtgttccaacaagactgggcgcttcctggccacagagatccctgacttcaatcaggatgacttggaagaggatgatgtgttcctactagatgtctgggaccaggtcttcttctggattgggaaacatgccaacgaggaggagaagaaggccgcagcaaccactgcacaggaatacctcaagacccatcccagcgggcgtgaccctgagacccccatcattgtggtgaagcagggacacgagccccccaccttcacaggctggttcctggcttgggatcccttcaagtggagtaacaccaaatcctatgaggacctgaaggcggagcttggcaactctagggactggagccagatcactgctgaggtcacaagccccaaagtggacgtgttcaatgctaacagcaacctcagttctgggcctctgcccatcttccccctggagcagctagtgaacaagcctgtagaggagctccccgagggtgtggaccccagcaggaaggaggaacacctgtccattgaagatttcactcaggcctttgggatgactccagctgccttctctgctctgcctcgatggaagcaacaaaacctcaagaaagaaaaaggactattttgagaagagtagctgtggttgtaaagcagtaccctaccctgattgtagggtctcattttctcaccgatattagtcctacaccaattgaagtgaaattttgcagatgtgcctatgagcacaaacttctgtggcaaatgccagttttgtttaataatgtacctattccttcagaaagatgataccccaaaaggaaaaaaaaaaaaaaaaaaaaaa

SEQ ID NO: 70 - DNA, 2358 bp, Homo sapiens
  gene (1)..(2358): Accession No. NM_021632
agcagtttacggaagtgtaacgttgaggcccttcttgtgtatctggagaaaatagaggttctgactcctcaggagcaaaaaacataacctgaagagggaggaagtggatttggggttcaccatttcttggggcacacttgattgaaaactgagacttctgaagagaaggccagaagatacaaagacagaccatcccagttgaatgctgtcttccaagaacagaagaaaatgatccaggcccaggaatccataacactggaggatgtggctgtggacttcacttgggaggagtggcaactcctgggcgctgctcagaaggacctgtaccgggatgtgatgttggagaactacagcaacctggtggcagtggggtatcaagccagcaaaccggatgcactcttcaagttggaacaaggagaacaactgtggacaattgaagatggaatccacagtggagcctgttcagacatatggaaagttgatcatgtgctggagcgcttgcagagtgaaagcctggtgaacagaaggaaaccatgtcatgaacatgatgcatttgaaaatattgttcattgcagcaaaagtcagtttctgttagggcaaaatcatgatatatttgacttacgtggaaaaagtttgaaatccaatttaactttagttaaccagagcaaaggctatgaaataaagaactctgttgagtttactggaaatggggactcctttcttcatgctaaccatgaacgacttcatactgcaattaaattccctgcaagtcaaaaactcatcagcactaagtcccaattcatcagtcccaagcatcagaaaacacgaaaattagagaagcatcatgtgtgcagtgaatgtgggaaagccttcatcaagaagtcttggctaactgatcaccaggtaatgcatacaggagagaaaccccacagatgtagtctatgtgagaaagccttctccagaaagttcatgcttactgaacatcagcgaactcatacaggagaaaaaccttatgaatgccctgaatgtggcaaagcctttctcaagaaatcacggctcaacatacatcagaaaacacataccggagagaaaccctatatatgcagtgaatgtggaaaaggcttcatccagaaaggaaatctcattgtacaccagcgaattcatacaggtgagaaaccttatatatgcaatgaatgtggaaaaggcttcattcagaagacgtgtctcatagcacatcagagatttcacacaggaaagacgccctttgtgtgcagtgaatgtggaaaatcctgttctcagaaatcaggtctcattaaacatcaaagaattcacacaggagagaaaccctttgaatgtagtgaatgtgggaaagcctttagcacaaagcaaaagctcattgtccatcaaaggactcatacaggagagagaccctatggctgtaacgagtgtgggaaagcgtttgcgtatatgtcgtgtctggttaagcataagagaatacacacaagggagaaacaagaggcagccaaggtggaaaatcctcctgcagagaggcacagctcattacacaccagtgatgtcatgcaggagaaaaactctgctaacggggcgactacacaagtgccttctgtggcccctcagacatcattaaacatcagcggcctcctcgcaaacaggaacgtagtccttgtgggacagccagtggtcagatgtgcagcctcaggagataacagaggatttgcacaggacagaaaccttgtgaatgcagtgaatgtggttgtgccttccgtgatcaattatgtcttattttatgttacagaaaacccataggaagaaaactcagatctatgtggaaaagggttgagcaaaaatttgtagttcattatgtggccgaaaagcatacactgagagaacatgtataaggctgagatagcctgataaactcatcctattaaaatgtatgctgtgatacacaggcaaatttgatgttaacctaagcacatacacagcaattgctcgactgtgtcaattaaatgagtaaaggaagcccaagtacttttaagtggaggaaatgaagtactgtgaatttttaaaacagatgagataattggtgtcgggagtgttgcagtgactgaaaagcttcataaggggcagttggtgggaaagggctaatactgtaatggtggaatgtgggacacatatgtgtcaattcagtttccttagaccagtgccagtgtggaggattaattgaaaaccaggaccataaactttcagaactttgtattatgcagagggatctgtgaaactagtcaatttgtttcattaaacaaatattttaaaattaaaaaaaaaaaaaaaaaa

SEQ ID NO: 71 - DNA, 2325 bp, Homo sapiens
  gene (1)..(2325): Accession No. NM_003461
cccgccccctctcttctccctccctcctccttccgtgtgtccctccccgcccggctggaggctgctccggaccgggacgcagagtctgcggacccggcgccgaggcggccacccgagacgcggcgcgcacgctccggcctgcgcagcccggcccggccatggcggccccccgcccgtctcccgcgatctccgtttcggtctcggctccggctttttacgccccgcagaagaagttcggccctgtggtggccccaaagcccaaagtgaatcccttccggcccggggacagcgagcctcccccggcacccggggcccagcgcgcacagatgggccgggtgggcgagattcccccgccgcccccggaagactttcccctgcctccacctccccttgctggggatggcgacgatgcagagggtgctctgggaggtgccttcccgccgccccctcccccgatcgaggaatcatttccccctgcgcctctggaggaggagatcttcccttccccgccgcctcctccggaggaggagggagggcctgaggcccccataccgcccccaccacagcccagggagaaggtgagcagtattgatttggagatcgactctctgtcctcactgctggatgacatgaccaagaatgatcctttcaaagcccgggtgtcatctggatatgtgcccccaccagtggccactccattcagttccaagtccagtaccaagcctgcagccgggggcacagcacccctgcctccttggaagtccccttccagctcccagcctctgccccaggttccggctccggctcagagccagacacagttccatgttcagccccagccccagcccaagcctcaggtccaactccatgtccagtcccagacccagcctgtgtctttggctaacacccagccccgagggcccccagcctcatctccggctccagcccctaagttttctccagtgactcctaagtttactcctgtggcttccaagttcagtcctggagccccaggtggatctgggtcacaaccaaatcaaaaattggggcaccccgaagctctttctgctggcacaggctcccctcaacctcccagcttcacctatgcccagcagagggagaagccccgagtgcaggagaagcagcaccccgtgcccccaccggctcagaaccaaaaccaggtgcgctcccctggggccccagggcccctgactctgaaggaggtggaggagctggagcagctgacccagcagctaatgcaggacatggagcatcctcagaggcagaatgtggctgtcaacgaactctgcggccgatgccatcaacccctggcccgggcgcagccagccgtccgcgctctagggcagctgttccacatcgcctgcttcacctgccaccagtgtgcgcagcagctccagggccagcagttctacagtctggagggggcgccgtactgcgagggctgttacactgacaccctggagaagtgtaacacctgcggggagcccatcactgaccgcatgctgagggccacgggcaaggcctatcacccgcactgcttcacctgtgtggtctgcgcccgccccctggagggcacctccttcatcgtggaccaggccaaccggccccactgtgtccccgactaccacaagcagtacgccccgaggtgctccgtctgctctgagcccatcatgcctgagcctggccgagatgagactgtgcgagtggtcgccctggacaagaacttccacatgaagtgttacaagtgtgaggactgcgggaagcccctgtcgattgaggcagatgacaatggctgcttccccctggacggtcacgtgctctgtcggaagtgccacactgctagagcccagacctgagtgaggacaggccctcttcagaccgcagtccatgccccattgtggaccacccacactgagaccacctgcccccacctcagttattgttttgatgtctagcccctcccatttccaacccctccctagcatcccaggtgccctgacccaggacccaacatggtctagggatgcaggatccccgccctggggtctggtcctcgcccatcctgcagggattgcccaccgtcttccagacaccccacctgaggggggcaccaggtttagtgctgctgctttcactgctgcacccgcgccctcggccggccccccgagcagcctttgtactctgcttgcggagggctgggagaccctccaggacattcccaccctcccccatgctgccaagttgtagctatagctacaaataaaaaaaaaccttgttttccagaaaaaaaaaaaaaaaaaaaaa

SEQ ID NO: 72 - DNA, 3572 bp, Homo sapiens
  gene (1)..(3572): Accession No. NM_003183
acctgcacttctgggggcgtcgagcctggcggtagaatcttcccagtaggcggcgcgggagggaaaagaggattgaggggctaggccgggcggatcccgtcctcccccgatgtgagcagttttccgaaaccccgtcaggcgaaggctgcccagagaggtggagtcggtagcggggccgggaacatgaggcagtctctcctattcctgaccagcgtggttcctttcgtgctggcgccgcgacctccggatgacccgggcttcggcccccaccagagactcgagaagcttgattctttgctctcagactacgatattctctctttatctaatatccagcagcattcggtaagaaaaagagatctacagacttcaacacatgtagaaacactactaactttttcagctttgaaaaggcattttaaattatacctgacatcaagtactgaacgtttttcacaaaatttcaaggtcgtggtggtggatggtaaaaacgaaagcgagtacactgtaaaatggcaggacttcttcactggacacgtggttggtgagcctgactctagggttctagcccacataagagatgatgatgttataatcagaatcaacacagatggggccgaatataacatagagccactttggagatttgttaatgataccaaagacaaaagaatgttagtttataaatctgaagatatcaagaatgtttcacgtttgcagtctccaaaagtgtgtggttatttaaaagtggataatgaagagttgctcccaaaagggttagtagacagagaaccacctgaagagcttgttcatcgagtgaaaagaagagctgacccagatcccatgaagaacacgtgtaaattattggtggtagcagatcatcgcttctacagatacatgggcagaggggaagagagtacaactacaaattacttaatagagctaattgacagagttgatgacatctatcggaacacttcatgggataatgcaggttttaaaggctatggaatacagatagagcagattcgcattctcaagtctccacaagaggtaaaacctggtgaaaagcactacaacatggcaaaaagttacccaaatgaagaaaaggatgcttgggatgtgaagatgttgctagagcaatttagctttgatatagctgaggaagcatctaaagtttgcttggcacaccttttcacataccaagattttgatatgggaactcttggattagcttatgttggctctcccagagcaaacagccatggaggtgtttgtccaaaggcttattatagcccagttgggaagaaaaatatctatttgaatagtggtttgacgagcacaaagaattatggtaaaaccatccttacaaaggaagctgacctggttacaactcatgaattgggacataattttggagcagaacatgatccggatggtctagcagaatgtgccccgaatgaggaccagggagggaaatatgtcatgtatcccatagctgtgagtggcgatcacgagaacaataagatgttttcaaactgcagtaaacaatcaatctataagaccattgaaagtaaggcccaggagtgttttcaagaacgcagcaataaagtttgtgggaactcgagggtggatgaaggagaagagtgtgatcctggcatcatgtatctgaacaacgacacctgctgcaacagcgactgcacgttgaaggaaggtgtccagtgcagtgacaggaacagtccttgctgtaaaaactgtcagtttgagactgcccagaagaagtgccaggaggcgattaatgctacttgcaaaggcgtgtcctactgcacaggtaatagcagtgagtgcccgcctccaggaaatgctgaagatgacactgtttgcttggatcttggcaagtgtaaggatgggaaatgcatccctttctgcgagagggaacagcagctggagtcctgtgcatgtaatgaaactgacaactcctgcaaggtgtgctgcagggacctttctggccgctgtgtgccctatgtcgatgctgaacaaaagaacttatttttgaggaaaggaaagccctgtacagtaggattttgtgacatgaatggcaaatgtgagaaacgagtacaggatgtaattgaacgattttgggatttcattgaccagctgagcatcaatacttttggaaagtttttagcagacaacatcgttgggtctgtcctggttttctccttgatattttggattcctttcagcattcttgtccattgtgtggataagaaattggataaacagtatgaatctctgtctctgtttcaccccagtaacgtcgaaatgctgagcagcatggattctgcatcggttcgcattatcaaaccctttcctgcgccccagactccaggccgcctgcagcctgcccctgtgatcccttcggcgccagcagctccaaaactggaccaccagagaatggacaccatccaggaagaccccagcacagactcacatatggacgaggatgggtttgagaaggaccccttcccaaatagcagcacagctgccaagtcatttgaggatctcacggaccatccggtcaccagaagtgaaaaggctgcctcctttaaactgcagcgtcagaatcgtgttgacagcaaagaaacagagtgctaatttagttctcagctcttctgacttaagtgtgcaaaatatttttatagatttgacctacaaatcaatcacagcttgtattttgtgaagactgggaagtgacttagcagatgctggtcatgtgtttgaacttcctgcaggtaaacagttcttgtgtggtttggcccttctccttttgaaaaggtaaggtgaaggtgaatctagcttattttgaggctttcaggttttagtttttaaaatatcttttgacctgtggtgcaaaagcagaaaatacagctggattgggttatgaatatttacgtttttgtaaattaatcttttatattgataacagcactgactagggaaatgatcagtttttttttatacactgtaatgaaccgctgaatatgaggcatttggcatttatttgtgatgacaactggaatagttttttttttttttttttttttttgccttcaactaaaaacaaaggagataaatctagtatacattgtctctaaattgtgggtctatttctagttattacccagagtttttatgtagcagggaaaatatatatctaaatttagaaatcatttgggttaatatggctcttcataattctaagactaatgctctctagaaacctaaccacctaccttacagtgagggctatacatggtagccagttgaatttatggaatctaccaactgtttagggccctgatttgctgggcagtttttctgtattttataagtatcttcatgtatccctgttactgatagggatacatgctcttagaaaattcactattggctgggagtggtggctcatgcctgtaatcccagcacttggagaggctgaggttgcgccactacactccagcctgggtgacagagtgagactctgcctcaaaaaaaaaaaaaaaaaaaaa

SEQ ID NO: 73 - DNA, 2568 bp, Homo sapiens
  gene (1)..(2568): Accession No. NM_000698
gccagggaccagtggtgggaggaggctgcggcgctagatgcggacacctggaccgccgcgccgaggctcccggcgctcgctgctcccgcggcccgcgccatgccctcctacacggtcaccgtggccactggcagccagtggttcgccggcactgacgactacatctacctcagcctcgtgggctcggcgggctgcagcgagaagcacctgctggacaagcccttctacaacgacttcgagcgtggcgcggtggattcatacgacgtgactgtggacgaggaactgggcgagatccagctggtcagaatcgagaagcgcaagtactggctgaatgacgactggtacctgaagtacatcacgctgaagacgccccacggggactacatcgagttcccctgctaccgctggatcaccggcgatgtcgaggttgtcctgagggatggacgcgcaaagttggcccgagatgaccaaattcacattctcaagcaacaccgacgtaaagaactggaaacacggcaaaaacaatatcgatggatggagtggaaccctggcttccccttgagcatcgatgccaaatgccacaaggatttaccccgtgatatccagtttgatagtgaaaaaggagtggactttgttctgaattactccaaagcgatggagaacctgttcatcaaccgcttcatgcacatgttccagtcttcttggaatgacttcgccgactttgagaaaatctttgtcaagatcagcaacactatttctgagcgggtcatgaatcactggcaggaagacctgatgtttggctaccagttcctgaatggctgcaaccctgtgttgatccggcgctgcacagagctgcccgagaagctcccggtgaccacggagatggtagagtgcagcctggagcggcagctcagcttggagcaggaggtccagcaagggaacattttcatcgtggactttgagctgctggatggcatcgatgccaacaaaacagacccctgcacactccagttcctggccgctcccatctgcttgctgtataagaacctggccaacaagattgtccccattgccatccagctcaaccaaatcccgggagatgagaaccctattttcctcccttcggatgcaaaatacgactggcttttggccaaaatctgggtgcgttccagtgacttccacgtccaccagaccatcacccaccttctgcgaacacatctggtgtctgaggtttttggcattgcaatgtaccgccagctgcctgctgtgcaccccattttcaagctgctggtggcacacgtgagattcaccattgcaatcaacaccaaggcccgtgagcagctcatctgcgagtgtggcctctttgacaaggccaacgccacagggggcggtgggcacgtgcagatggtgcagagggccatgaaggacctgacctatgcctccctgtgctttcccgaggccatcaaggcccggggcatggagagcaaagaagacatcccctactacttctaccgggacgacgggctcctggtgtgggaagccatcaggacgttcacggccgaggtggtagacatctactacgagggcgaccaggtggtggaggaggacccggagctgcaggacttcgtgaacgatgtctacgtgtacggcatgcggggccgcaagtcctcaggcttccccaagtcggtcaagagccgggagcagctgtcggagtacctgaccgtggtgatcttcaccgcctccgcccagcacgccgcggtcaacttcggccagtacgactggtgctcctggatccccaatgcgcccccaaccatgcgagccccgccaccgactgccaagggcgtggtgaccattgagcagatcgtggacacgctgcccgaccgcggccgctcctgctggcatctgggtgcagtgtgggcgctgagccagttccaggaaaacgagctgttcctgggcatgtacccagaagagcattttatcgagaagcctgtgaaggaagccatggcccgattccgcaagaacctcgaggccattgtcagcgtgattgctgagcgcaacaagaagaagcagctgccatattactacttgtccccagaccggattccgaacagtgtggccatctgagcacactgccagtctcactgtgggaaggccagctgccccagccagatggactccagcctgcctggcaggctgtctggccaggcctcttggcagtcacatctcttcctccgaggccagtacctttccatttattctttgatcttcagggaactgcatagattgatcaaagtgtaaacaccatagggacccattctacacagagcaggactgcacagcgtcctgtccacacccagctcagcatttccacaccaagcagcaacagcaaatcacgaccactgatagatgtctattcttgttggagacatgggatgattattttctgttctatttgtgcttagtccaattccttgcacatagtaggtacccaattcaattactattgaatgaattaagaattggttgccataaaaataaatcagttcatttaaaaaaaaaaaaaaaaaa

SEQ ID NO: 74 - DNA, 7171 bp, Homo sapiens
  gene (1)..(7171): Accession No. NM_013229
aagaagaggtagcgagtggacgtgactgctctatcccgggcaaaagggatagaaccagaggtggggagtctgggcagtcggcgacccgcgaagacttgaggtgccgcagcggcatccggagtagcgccgggctccctccggggtgcagccgccgtcgggggaagggcgccacaggccgggaagacctcctccctttgtgtccagtagtggggtccaccggagggcggcccgtgggccgggcctcaccgcggcgctccgggactgtggggtcaggctgcgttgggtggacgcccacctcgccaaccttcggaggtccctgggggtcttcgtgcgccccggggctgcagagatccaggggaggcgcctgtgaggcccggacctgccccggggcgaagggtatgtggcgagacagagccctgcacccctaattcccggtggaaaactcctgttgccgtttccctccaccggcctggagtctcccagtcttgtcccggcagtgccgccctccccactaagacctaggcgcaaaggcttggctcatggttgacagctcagagagagaaagatctgagggaagatggatgcaaaagctcgaaattgtttgcttcaacatagagaagctctggaaaaggacatcaagacatcctacatcatggatcacatgattagtgatggatttttaacaatatcagaagaggaaaaagtaagaaatgagcccactcaacagcaaagagcagctatgctgattaaaatgatacttaaaaaagataatgattcctacgtatcattctacaatgctctactacatgaaggatataaagatcttgctgcccttctccatgatggcattcctgttgtctcttcttccagtgtaaggacagtcctgtgtgaaggtggagtaccacagaggccagttgtttttgtcacaaggaagaagctggtgaatgcaattcagcagaagctctccaaattgaaaggtgaaccaggatgggtcaccatacatggaatggcaggctgtgggaagtctgtattagctgcagaagctgttagagatcattcccttttagaaggttgtttcccagggggagtgcattgggtttcagttgggaaacaagacaaatctgggcttctgatgaaactgcagaatctttgcacacggttggatcaggatgagagtttttcccagaggcttccacttaatattgaagaggctaaagaccgtctccgcattctgatgcttcgcaaacacccaaggtctctcttgatcttggatgatgtttgggactcttgggtgttgaaagcttttgacagtcagtgtcagattcttcttacaaccagagacaagagtgttacagattcagtaatgggtcctaaatatgtagtccctgtggagagttccttaggaaaggaaaaaggacttgaaattttatccctttttgttaatatgaagaaggcagatttgccagaacaagctcatagtattataaaagaatgtaaaggctctccccttgtagtatctttaattggtgcacttttacgtgattttcccaatcgctgggagtactacctcaaacagcttcagaataagcagtttaagagaataaggaaatcttcgtcttatgattatgaggctctagatgaagccatgtctataagtgttgaaatgctcagagaagacatcaaagattattacacagatctttccatccttcagaaggacgttaaggtgcctacaaaggtgttatgtattctctgggacatggaaactgaagaagttgaagacatactgcaggagtttgtaaataagtctcttttattctgtgatcggaatggaaagtcgtttcgttattatttacatgatcttcaagtagattttcttacagagaagaattgcagccagcttcaggatctacataagaagataatcactcagtttcagagatatcaccagccgcatactctttcaccagatcaggaagactgtatgtattggtacaactttctggcctatcacatggccagtgccaagatgcacaaggaactttgtgctttaatgttttccctggattggattaaagcaaaaacagaacttgtaggccctgctcatctgattcatgaatttgtggaatacagacatatactagatgaaaaggattgtgcagtcagtgagaattttcaggagtttttatctttaaatggacaccttcttggacgacagccatttcctaatattgtacaactgggtctctgtgagccggaaacttcagaagtttatcagcaagctaagctgcaggccaagcaggaggtcgataatggaatgctttacctggaatggataaacaaaaaaaacatcacgaatctttcccgcttagttgtccgcccccacacagatgctgtttaccatgcctgcttttctgaggatggtcagagaatagcttcttgtggagctgataaaaccttacaggtgttcaaagctgaaacaggagagaaacttctagaaatcaaggctcatgaggatgaagtgctttgttgtgcattctctacagatgacagatttatagcaacctgctcagtggataaaaaagtgaagatttggaattctatgactggggaactagtacacacctatgatgagcactcagagcaagtcaattgctgccatttcaccaacagtagtcatcatcttctcttagccactgggtcaagtgactgcttcctcaaactttgggatttgaatcaaaaagaatgtcgaaataccatgtttggtcatacaaattcagtcaatcactgcagattttcaccagatgataagcttttggctagttgttcagctgatggaaccttaaagctttgggatgcgacatcagcaaatgagaggaaaagcattaatgtgaaacagttcttcctaaatttggaggaccctcaagaggatatggaagtgatagtgaagtgttgttcgtggtctgctgatggtgcaaggataatggtggcagcaaaaaataaaatctttctttttgacattcatactagtggcctattgggagaaatccacacgggccatcacagcaccatccagtactgtgacttctccccacaaaaccatttggcagtggttgctttgtcccagtactgtgtagagttgtggaatacagactcacgttcaaaggtggctgattgcagaggacatttaagttgggttcatggtgtgatgttttctcctgatggatcatcatttttgacatcttctgatgaccagacaatcaggctctgggagacaaagaaagtatgtaagaactctgctgtaatgttaaagcaagaagtagatgttgtgtttcaagaaaatgaagtgatggtccttgcagttgaccatataagacgtctgcaactcattaatggaagaacaggtcagattgattatctgactgaagctcaagttagctgctgttgcttaagtccacatcttcagtacattgcatttggagatgaaaatggagccattgagattttagaacttgtaaacaatagaatcttccagtccaggtttcagcacaagaaaactgtatggcacatccagttcacagccgatgagaagactcttatttcaagttctgatgatgctgaaattcaggtatggaattggcaattggacaaatgtatctttctacgaggccatcaggaaacagtgaaagactttagactcttgaaaaattcaagactgctttcttggtcatttgatggaacagtgaaggtatggaatattattactggaaataaagaaaaagactttgtctgtcaccagggtacagtactttcttgtgacatttctcacgatgctaccaagttttcatctacctctgctgacaagactgcaaagatctggagttttgatctccttttgccacttcatgaattgaggggccacaacggctgtgtgcgctgctctgccttctctgtggacagtaccctgctggcaacgggagatgacaatggagaaatcaggatatggaatgtctcaaacggtgagcttcttcatttgtgtgctccgctttcagaagaaggagctgctacccatggaggctgggtgactgacctttgcttttctccagatggcaaaatgcttatctctgctggaggatatattaagtggtggaacgttgtcactggggaatcctcacagaccttctacacaaatggaaccaatcttaagaaaatacacgtgtcccctgacttcaaaacatatgtgactgtggataatcttggtattttatatattttacagactttagaataaaatagttaagcattaatgtagttgaactttttaaatttttgaattggaaaaaaattctaatgaaaccctgatatcaactttttataaagctcttaattgttgtgcagtattgcattcattacaaaagtgtttgtggttggatgaataatattaatgtagctttttcccaaatgaacatacctttaatcttgtttttcatgatcatcattaacagtttgtccttaggatgcaaatgaaaatgtgaatacataccttgttgtactgttggtaaaattctgtcttgatgcattcaaaatggttgacataattaatgagaagaatttggaagaaattggtattttaatactgtctgtatttattactgttatgcaggctgtgcctcagggtagcagtggcctgctttttgaaccacacttaccccaagggggttttgttctcctaaatacaatcttagaggttttttgcactctttaaatttgctttaaaaatattgtgtctgtgtgcatagtctgcagcatttcctttaattgactcaataagtgagtcttggatttagcaggcccccccaccttttttttttgtttttggagacagagtcttgctttgttgccaggctggagtgcagtggcgcgatctcggctcaccacaatcgctgcctcctgggttcaagcaattctcctgcctcagcctcccgagtagctgggactacaggtgtgcgcacatgccaggctaatttttgtatttttagtagagacggggtttcaccatgttggccgggatggtctcgatctcttgacctcatgatctacccgccttggcctcccaaagtgctgagattacaggcgtgagccaccgtgcctggccaggccccttctcttttaatggagacagggtcttgcactatcacccaggctggagtgcagtggcataatcatacctcattgcagcctcagactcctgggttcaagcaatcctcctgcctcagcctcccaagtagctgagactacaggcacgagccaccacacccagctaatttttaagttttcttgtagagacagggtctcactatgttgtctaggctggtcttgaactcttggcctcaagtaatcctcctgcctcagcctcccaaagtgttgggattgcagatatgagccactggcctggccttcagcagttctttttgtgaagtaaaacttgtatgttggaaagagtagattttattggtctacccttttctcactgtagctgctggcagccctgtgccatatctggactctagttgtcagtatctgagttggacactattcctgctccctcttgtttcttacatatcagacttcttacttgaatgaaacctgatctttcctaatcctcacttttttcttttttaaaaagcagtttctccactgctaaatgttagtcattgaggtggggccaattttaatcataagccttaataagatttttctaagaaatgtgaaatagaacaattttcatctaattccatttacttttagatgaatggcattgtgaatgccattcttttaatgaatttcaagagaattctctggttttctgtgtaattccagatgagtcactgtaactctagaagattaaccttccagccaacctattttcctttcccttgtctctctcatcctcttttccttccttctttcctttctcttcttttatctccaaggttaatcaggaaaaatagcttttgacaggggaaaaaactcaataactagctatttttgacctcctgatcaggaactttagttgaagcgtaaatctaaagaaacattttctctgaaatatattattaagggcaatggagataaattaatagtagatgtggttcccagaaaatataatcaaaattcaaagattttttttgtttctgtaactggaactaaatcaaatgattactagtgttaatagtagataacttgtttttattgttggtgcatattagtataactgtggggtaggtcggggagagggtaagggaatagatcactcagatgtattttagataagctatttagcctttgatggaatcataaatacagtgaatacaatcctttgcattgttaaggaggttttttgtttttaaatggtgggtcaaggagctagtttacaggcttactgtgatttaagcaaatgtgaaaagtgaaaccttaattttatcaaaagaaatttctgtaaatggtatgtctccttagaatacccaaatcataattttatttgtacacactgttaggggctcatctcatgtaggcagagtataaagtattaccttttggaattaaaagccactgactgttataaagtataacaacacacatcaggttttaaaaagccttgaatggcccttgtcttaaaaagaaattaggagccaggtgcggtggcacgtgcctgtaatcccagctccttgggaggctaagacaggaggattccttgagccctggagtttgagtccagcctgggtgacatagcaagaccctgtcttaaaagaaaaatgggaagaaagacaaggtaacatgaagaaagaagagatacctagtatgatggagctgcaaatttcatggcagttcatgcagtcggtcaagaggaggattttgttttgtagtttgcagatgagcatttctaaagcattttcccttgctgtatttttttgtattataaattacattggacttcatatatataatttttttttacattatatgtctcttgtatgttttgaaactcttgtatttatgatatagcttatatgatttttttgccttggtatacattttaaaatatgaatttaaaaaatttttgtaaaaataaaattcacaaaattgttttgaaaaacaaaaaaaaaaaaaa

SEQ ID NO: 75 - DNA, 1098 bp, Homo sapiens
  gene (1)..(1098): Accession No. NM_015991
gccactcctgctgggcagcccacagggtccctgggcggagggcaggagcatccagttggagttgacaacaggaggcagaggcatcatggagggtccccggggatggctggtgctctgtgtgctggccatatcgctggcctctatggtgaccgaggacttgtgccgagcaccagacgggaagaaaggggaggcaggaagacctggcagacgggggcggccaggcctcaagggggagcaaggggagccgggggcccctggcatccggacaggcatccaaggccttaaaggagaccagggggaacctgggccctctggaaaccccggcaaggtgggctacccagggcccagcggccccctcggagcccgtggcatcccgggaattaaaggcaccaagggcagcccaggaaacatcaaggaccagccgaggccagccttctccgccattcggcggaaccccccaatggggggcaacgtggtcatcttcgacacggtcatcaccaaccaggaagaaccgtaccagaaccactccggccgattcgtctgcactgtacccggctactactacttcaccttccaggtgctgtcccagtgggaaatctgcctgtccatcgtctcctcctcaaggggccaggtccgacgctccctgggcttctgtgacaccaccaacaaggggctcttccaggtggtgtcagggggcatggtgcttcagctgcagcagggtgaccaggtctgggttgaaaaagaccccaaaaagggtcacatttaccagggctctgaggccgacagcgtcttcagcggcttcctcatcttcccatctgcctgagccagggaaggaccccctcccccacccacctctctggcttccatgctccgcctgtaaaatgggggcgctattgcttcagctgctgaagggagggggctggctctgagagccccaggactggctgccccgtgacacatgctctaagaagctcgtttcttagacctcttcctggaataaacatctgtgtctgtgtctgctgaacatgagcttcagttgctactcggagcattgagagggaggcctaagaataataacaatccagtgcttaagagtca

SEQ ID NO: 76 - DNA, 1364 bp, Homo sapiens
  gene (1)..(1364): Accession No. NM_033292
gggaggagagaaaagccatggccgacaaggtcctgaaggagaagagaaagctgtttatccgttccatgggtgaaggtacaataaatggcttactggatgaattattacagacaagggtgctgaacaaggaagagatggagaaagtaaaacgtgaaaatgctacagttatggataagacccgagctttgattgactccgttattccgaaaggggcacaggcatgccaaatttgcatcacatacatttgtgaagaagacagttacctggcagggacgctgggactctcagcagatcaaacatctggaaattaccttaatatgcaagactctcaaggagtactttcttcctttccagctcctcaggcagtgcaggacaacccagctatgcccacatcctcaggctcagaagggaatgtcaagctttgctccctagaagaagctcaaaggatatggaaacaaaagtcggcagagatttatccaataatggacaagtcaagccgcacacgtcttgctctcattatctgcaatgaagaatttgacagtattcctagaagaactggagctgaggttgacatcacaggcatgacaatgctgctacaaaatctggggtacagcgtagatgtgaaaaaaaatctcactgcttcggacatgactacagagctggaggcatttgcacaccgcccagagcacaagacctctgacagcacgttcctggtgttcatgtctcatggtattcgggaaggcatttgtgggaagaaacactctgagcaagtcccagatatactacaactcaatgcaatctttaacatgttgaataccaagaactgcccaagtttgaaggacaaaccgaaggtgatcatcatccaggcctgccgtggtgacagccctggtgtggtgtggtttaaagattcagtaggagtttctggaaacctatctttaccaactacagaagagtttgaggatgatgctattaagaaagcccacatagagaaggattttatcgctttctgctcttccacaccagataatgtttcttggagacatcccacaatgggctctgtttttattggaagactcattgaacatatgcaagaatatgcctgttcctgtgatgtggaggaaattttccgcaaggttcgattttcatttgagcagccagatggtagagcgcagatgcccaccactgaaagagtgactttgacaagatgtttctacctcttcccaggacattaaaataaggaaactgtatgaatgtctgtgggcaggaagtgaagagatccttctgtaaaggtttttggaattatgtctgctgaataataaacttttttgaaataataaatctggtagaaaaatgaaaaaaaaaaa

SEQ ID NO: 77 - DNA, 2689 bp, Homo sapiens
  gene (1)..(2689): Accession No. NM_004346
acatctcccggcggcgggccgcggaagcagtgcagacgcggctcctagcggatgggtgctattgtgaggcggttgtagaagagtttcgtgagtgctcgcagctcatacctgtggctgtgtatccgtggccacagctggttggcgtcgccttgaaatcccaggccgtgaggagttagcgagccctgctcacactcggcgctctggttttcggtgggtgtgccctgcacctgcctcttcccccattctcattaataaaggtatccatggagaacactgaaaactcagtggattcaaaatccattaaaaatttggaaccaaagatcatacatggaagcgaatcaatggactctggaatatccctggacaacagttataaaatggattatcctgagatgggtttatgtataataattaataataagaattttcataaaagcactggaatgacatctcggtctggtacagatgtcgatgcagcaaacctcagggaaacattcagaaacttgaaatatgaagtcaggaataaaaatgatcttacacgtgaagaaattgtggaattgatgcgtgatgtttctaaagaagatcacagcaaaaggagcagttttgtttgtgtgcttctgagccatggtgaagaaggaataatttttggaacaaatggacctgttgacctgaaaaaaataacaaactttttcagaggggatcgttgtagaagtctaactggaaaacccaaacttttcattattcaggcctgccgtggtacagaactggactgtggcattgagacagacagtggtgttgatgatgacatggcgtgtcataaaataccagtggaggccgacttcttgtatgcatactccacagcacctggttattattcttggcgaaattcaaaggatggctcctggttcatccagtcgctttgtgccatgctgaaacagtatgccgacaagcttgaatttatgcacattcttacccgggttaaccgaaaggtggcaacagaatttgagtccttttcctttgacgctacttttcatgcaaagaaacagattccatgtattgtttccatgctcacaaaagaactctatttttatcactaaagaaatggttggttggtggttttttttagtttgtatgccaagtgagaagatggtatatttggtactgtatttccctctcattttgacctactctcatgctgcagagggtactttaagacatactccttccatcaaatagaaccactatgaagctacctcaaacttccagtcaggtagttgcaattgaattaaattaggaataaataaaaatggatactggtgcagtcattatgagaggcaatgattgttaatttacagctttcatgattagcaagttacagtgatgctgtgctatgaattttcaagtaattgtgaaaaagttaaacattgaagtaatgaatttttatgatattccccccacttaagactgtgtattctagttttgtcaaactgtagaaatgatgatgtggaagaacttaggcatctgtgggcatggtcaaaggctcaaacctttattttagaattgatatacacggatgacttaactgcatttttagaccatttatctgggattatggttttgtgatgtttgtcctgaacacttttgttgtaaaaaaataataataatgtttaatattgagaaagaaactaatattttatgtgagagaaagtgtgagcaaactaacttgacttttaaggctaaaacttaacattcatagaggggtggagttttaactgtaaggtgctacaatgcccctggatctaccagcataaatatcttctgatttgtccctatgcatatcagttgagcttcatataccagcaatatatctgaagagctattatataaaaaccccaaactgttgattattagccaggtaatgtgaataaattctataggaacatatgaaaatacaacttaaataataaacagtggaatataaggaaagcaataaatgaatgggctgagctgcctgtaacttgagagtagatggtttgagcctgagcagagacatgactcagcctgttccatgaaggcagagccatggaccacgcaggaagggcctacagcccatttctccatacgcactggtatgtgtggatgatgctgccagggcgccatcgccaagtaagaaagtgaagcaaatcagaaacttgtgaagtggaaatgttctaaaggtggtgaggcaataaaaatcatagtactctttgtagcaaaattcttaagtatgttattttctgttgaagtttacaatcaaaggaaaatagtaatgttttatactgtttactgaaagaaaaagacctatgagcacataggactctagacggcatccagccggaggccagagctgagccctcagcccgggaggcaggctccaggcctcagcaggtgcggagccgtcactgcaccaagtctcactggctgtcagtatgacatttcacgggagatttcttgttgctcaaaaaatgagctcgcatttgtcaatgacagtttcttttttcttactagacctgtaacttttgtaaatacacatagcatgtaatggtatcttaaagtgtgtttctatgtgacaattttgtacaaatttgttattttccatttttatttcaaaatatacattcaaacttaaaattaaaaaaaaaaaaaaaaa

SEQ ID NO: 78 - DNA, 813 bp, Homo sapiens
  gene (1)..(813): Accession No. NM_002983
agctggtttcagacttcagaaggacacgggcagcagacagtggtcagtcctttcttggctctgctgacactcgagcccacattccgtcacctgctcagaatcatgcaggtctccactgctgcccttgctgtcctcctctgcaccatggctctctgcaaccagttctctgcatcacttgctgctgacacgccgaccgcctgctgcttcagctacacctcccggcagattccacagaatttcatagctgactactttgagacgagcagccagtgctccaagcccggtgtcatcttcctaaccaagcgaagccggcaggtctgtgctgaccccagtgaggagtgggtccagaaatatgtcagcgacctggagctgagtgcctgaggggtccagaagcttcgaggcccagcgacctcggtgggcccagtggggaggagcaggagcctgagccttgggaacatgcgtgtgacctccacagctacctcttctatggactggttgttgccaaacagccacactgtgggactcttcttaacttaaattttaatttatttatactatttagtttttgtaatttattttcgatttcacagtgtgtttgtgattgtttgctctgagagttcccctgtcccctcccccttccctcacaccgcgtctggtgacaaccgagtggctgtcatcagcctgtgtaggcagtcatggcaccaaagccaccagactgacaaatgtgtatcggatgcttttgttcagggctgtgatcggcctggggaaataataaagatgctcttttaaaaggtaaaaaaaaaaaaaaaaaaa

SEQ ID NO: 79 - DNA, 1237 bp, Homo sapiens
  gene (1)..(1237): Accession No. NM_002985
gctgcagaggattcctgcagaggatcaagacagcacgtggacctcgcacagcctctcccacaggtaccatgaaggtctccgcggcagccctcgctgtcatcctcattgctactgccctctgcgctcctgcatctgcctccccatattcctcggacaccacaccctgctgctttgcctacattgcccgcccactgccccgtgcccacatcaaggagtatttctacaccagtggcaagtgctccaacccagcagtcgtctttgtcacccgaaagaaccgccaagtgtgtgccaacccagagaagaaatgggttcgggagtacatcaactctttggagatgagctaggatggagagtccttgaacctgaacttacacaaatttgcctgtttctgcttgctcttgtcctagcttgggaggcttcccctcactatcctaccccacccgctccttgaagggcccagattctaccacacagcagcagttacaaaaaccttccccaggctggacgtggtggctcacgcctgtaatcccagcactttgggaggccaaggtgggtggatcacttgaggtcaggagttcgagaccagcctggccaacatgatgaaaccccatctctactaaaaatacaaaaaattagccgggcgtggtagcgggcgcctgtagtcccagctactcgggaggctgaggcaggagaatggcgtgaacccgggaggcggagcttgcagtgagccgagatcgcgccactgcactccagcctgggcgacagagcgagactccgtctcaaaaaaaaaaaaaaaaaaaaaaatacaaaaattagccgggcgtggtggcccacgcctgtaatcccagctactcgggaggctaaggcaggaaaattgtttgaacccaggaggtggaggctgcagtgagctgagattgtgccacttcactccagcctgggtgacaaagtgagactccgtcacaacaacaacaacaaaaagcttccccaactaaagcctagaagagcttctgaggcgctgctttgtcaaaaggaagtctctaggttctgagctctggctttgccttggctttgccagggctctgtgaccaggaaggaagtcagcatgcctctagaggcaaggaggggaggaacactgcactcttaagcttccgccgtctcaacccctcacaggagcttactggcaaacatgaaaaatcggcttaccattaaagttctcaatgcaaccataaaaaaaaaa

SEQ ID NO: 80 - DNA, 1796 bp, Homo sapiens
  gene (1)..(1796): Accession No. NM_001837
ctgatggtatctctgtttcaggagtggtgacgcctaagctatcactggacatatcaaggacttcactaaattagcaggtaccactggtcttcttgtgcttatccgggcaagaacttatcgaaatacaatagaagtttttacttagaagagattttcagcagatgagaagctggtaacagagaccaaaatagtttggagactaaagaatcattgcacatttcactgctgagttgtattggagaagtgaaatgacaacctcactagatacagttgagacctttggtaccacatcctactatgatgacgtgggcctgctctgtgaaaaagctgataccagagcactgatggcccagtttgtgcccccgctgtactccctggtgttcactgtgggcctcttgggcaatgtggtggtggtgatgatcctcataaaatacaggaggctccgaattatgaccaacatctacctgctcaacctggccatttcggacctgctcttcctcgtcacccttccattctggatccactatgtcagggggcataactgggtttttggccatggcatgtgtaagctcctctcagggttttatcacacaggcttgtacagcgagatctttttcataatcctgctgacaatcgacaggtacctggccattgtccatgctgtgtttgcccttcgagcccggactgtcacttttggtgtcatcaccagcatcgtcacctggggcctggcagtgctagcagctcttcctgaatttatcttctatgagactgaagagttgtttgaagagactctttgcagtgctctttacccagaggatacagtatatagctggaggcatttccacactctgagaatgaccatcttctgtctcgttctccctctgctcgttatggccatctgctacacaggaatcatcaaaacgctgctgaggtgccccagtaaaaaaaagtacaaggccatccggctcatttttgtcatcatggcggtgtttttcattttctggacaccctacaatgtggctatccttctctcttcctatcaatccatcttatttggaaatgactgtgagcggagcaagcatctggacctggtcatgctggtgacagaggtgatcgcctactcccactgctgcatgaacccggtgatctacgcctttgttggagagaggttccggaagtacctgcgccacttcttccacaggcacttgctcatgcacctgggcagatacatcccattccttcctagtgagaagctggaaagaaccagctctgtctctccatccacagcagagccggaactctctattgtgttttaggtcagatgcagaaaattgcctaaagaggaaggaccaaggagatgaagcaaacacattaagccttccacactcacctctaaaacagtccttcaaacttccagtgcaacactgaagctcttgaagacactgaaatatacacacagcagtagcagtagatgcatgtaccctaaggtcattaccacaggccaggggctgggcagcgtactcatcatcaaccctaaaaagcagagctttgcttctctctctaaaatgagttacctacattttaatgcacctgaatgttagatagttactatatgccgctacaaaaaggtaaaactttttatattttatacattaacttcagccagctattgatataaataaaacattttcacacaatacaataagttaactattttattttctaatgtgcctagttctttccctgcttaatgaaaagcttgttttttcagtgtgaataaataatcgtaagcaaca

SEQ ID NO: 81 - DNA, 3686 bp, Homo sapiens
  gene (1)..(3686): Accession No. NM_000579
cttcagatagattatatctggagtgaagaatcctgccacctatgtatctggcatagtattctgtgtagtgggatgagcagagaacaaaaacaaaataatccagtgagaaaagcccgtaaataaaccttcagaccagagatctattctctagcttattttaagctcaacttaaaaagaagaactgttctctgattcttttcgccttcaatacacttaatgatttaactccaccctccttcaaaagaaacagcatttcctacttttatactgtctatatgattgatttgcacagctcatctggccagaagagctgagacatccgttcccctacaagaaactctccccgggtggaacaagatggattatcaagtgtcaagtccaatctatgacatcaattattatacatcggagccctgccaaaaaatcaatgtgaagcaaatcgcagcccgcctcctgcctccgctctactcactggtgttcatctttggttttgtgggcaacatgctggtcatcctcatcctgataaactgcaaaaggctgaagagcatgactgacatctacctgctcaacctggccatctctgacctgtttttccttcttactgtccccttctgggctcactatgctgccgcccagtgggactttggaaatacaatgtgtcaactcttgacagggctctattttataggcttcttctctggaatcttcttcatcatcctcctgacaatcgataggtacctggctgtcgtccatgctgtgtttgctttaaaagccaggacggtcacctttggggtggtgacaagtgtgatcacttgggtggtggctgtgtttgcgtctctcccaggaatcatctttaccagatctcaaaaagaaggtcttcattacacctgcagctctcattttccatacagtcagtatcaattctggaagaatttccagacattaaagatagtcatcttggggctggtcctgccgctgcttgtcatggtcatctgctactcgggaatcctaaaaactctgcttcggtgtcgaaatgagaagaagaggcacagggctgtgaggcttatcttcaccatcatgattgtttattttctcttctgggctccctacaacattgtccttctcctgaacaccttccaggaattctttggcctgaataattgcagtagctctaacaggttggaccaagctatgcaggtgacagagactcttgggatgacgcactgctgcatcaaccccatcatctatgcctttgtcggggagaagttcagaaactacctcttagtcttcttccaaaagcacattgccaaacgcttctgcaaatgctgttctattttccagcaagaggctcccgagcgagcaagctcagtttacacccgatccactggggagcaggaaatatctgtgggcttgtgacacggactcaagtgggctggtgacccagtcagagttgtgcacatggcttagttttcatacacagcctgggctgggggtggggtgggagaggtcttttttaaaaggaagttactgttatagagggtctaagattcatccatttatttggcatctgtttaaagtagattagatcttttaagcccatcaattatagaaagccaaatcaaaatatgttgatgaaaaatagcaacctttttatctccccttcacatgcatcaagttattgacaaactctcccttcactccgaaagttccttatgtatatttaaaagaaagcctcagagaattgctgattcttgagtttagtgatctgaacagaaataccaaaattatttcagaaatgtacaactttttacctagtacaaggcaacatataggttgtaaatgtgtttaaaacaggtctttgtcttgctatggggagaaaagacatgaatatgattagtaaagaaatgacacttttcatgtgtgatttcccctccaaggtatggttaataagtttcactgacttagaaccaggcgagagacttgtggcctgggagagctggggaagcttcttaaatgagaaggaatttgagttggatcatctattgctggcaaagacagaagcctcactgcaagcactgcatgggcaagcttggctgtagaaggagacagagctggttgggaagacatggggaggaaggacaaggctagatcatgaagaaccttgacggcattgctccgtctaagtcatgagctgagcagggagatcctggttggtgttgcagaaggtttactctgtggccaaaggagggtcaggaaggatgagcatttagggcaaggagaccaccaacagccctcaggtcagggtgaggatggcctctgctaagctcaaggcgtgaggatgggaaggagggaggtattcgtaaggatgggaaggagggaggtattcgtgcagcatatgaggatgcagagtcagcagaactggggtggatttgggttggaagtgagggtcagagaggagtcagagagaatccctagtcttcaagcagattggagaaacccttgaaaagacatcaagcacagaaggaggaggaggaggtttaggtcaagaagaagatggattggtgtaaaaggatgggtctggtttgcagagcttgaacacagtctcacccagactccaggctgtctttcactgaatgcttctgacttcatagatttccttcccatcccagctgaaatactgaggggtctccaggaggagactagatttatgaatacacgaggtatgaggtctaggaacatacttcagctcacacatgagatctaggtgaggattgattacctagtagtcatttcatgggttgttgggaggattctatgaggcaaccacaggcagcatttagcacatactacacattcaataagcatcaaactcttagttactcattcagggatagcactgagcaaagcattgagcaaaggggtcccatagaggtgagggaagcctgaaaaactaagatgctgcctgcccagtgcacacaagtgtaggtatcattttctgcatttaaccgtcaataggcaaaggggggaagggacatattcatttggaaataagctgccttgagccttaaaacccacaaaagtacaatttaccagcctccgtatttcagactgaatgggggtggggggggcgccttaggtacttattccagatgccttctccagacaaaccagaagcaacagaaaaaatcgtctctccctccctttgaaatgaatataccccttagtgtttgggtatattcatttcaaagggagagagagaggtttttttctgttctgtctcatatgattgtgcacatacttgagactgttttgaatttgggggatggctaaaaccatcatagtacaggtaaggtgagggaatagtaagtggtgagaactactcagggaatgaaggtgtcagaataataagaggtgctactgactttctcagcctctgaatatgaacggtgagcattgtggctgtcagcaggaagcaacgaagggaaatgtctttccttttgctcttaagttgtggagagtgcaacagtagcataggaccctaccctctgggccaagtcaaagacattctgacatcttagtatttgcatattcttatgtatgtgaaagttacaaattgcttgaaagaaaatatgcatctaataaaaaacaccttctaaaataaaaaaaaaaaaaaaaaaaaaaaaaaa

SEQ ID NO: 82 - DNA, 1966 bp, Homo sapiens
  gene (1)..(1966): Accession No. NM_001770
aggcccctgcctgccccagcatcccctgcgcgaagctgggtgccccggagagtctgaccaccatgccacctcctcgcctcctcttcttcctcctcttcctcacccccatggaagtcaggcccgaggaacctctagtggtgaaggtggaagagggagataacgctgtgctgcagtgcctcaaggggacctcagatggccccactcagcagctgacctggtctcgggagtccccgcttaaacccttcttaaaactcagcctggggctgccaggcctgggaatccacatgaggcccctggccatctggcttttcatcttcaacgtctctcaacagatggggggcttctacctgtgccagccggggcccccctctgagaaggcctggcagcctggctggacagtcaatgtggagggcagcggggagctgttccggtggaatgtttcggacctaggtggcctgggctgtggcctgaagaacaggtcctcagagggccccagctccccttccgggaagctcatgagccccaagctgtatgtgtgggccaaagaccgccctgagatctgggagggagagcctccgtgtctcccaccgagggacagcctgaaccagagcctcagccaggacctcaccatggcccctggctccacactctggctgtcctgtggggtaccccctgactctgtgtccaggggccccctctcctggacccatgtgcaccccaaggggcctaagtcattgctgagcctagagctgaaggacgatcgcccggccagagatatgtgggtaatggagacgggtctgttgttgccccgggccacagctcaagacgctggaaagtattattgtcaccgtggcaacctgaccatgtcattccacctggagatcactgctcggccagtactatggcactggctgctgaggactggtggctggaaggtctcagctgtgactttggcttatctgatcttctgcctgtgttcccttgtgggcattcttcatcttcaaagagccctggtcctgaggaggaaaagaaagcgaatgactgaccccaccaggagattcttcaaagtgacgcctcccccaggaagcgggccccagaaccagtacgggaacgtgctgtctctccccacacccacctcaggcctcggacgcgcccagcgttgggccgcaggcctggggggcactgccccgtcttatggaaacccgagcagcgacgtccaggcggatggagccttggggtcccggagcccgccgggagtgggcccagaagaagaggaaggggagggctatgaggaacctgacagtgaggaggactccgagttctatgagaacgactccaaccttgggcaggaccagctctcccaggatggcagcggctacgagaaccctgaggatgagcccctgggtcctgaggatgaagactccttctccaacgctgagtcttatgagaacgaggatgaagagctgacccagccggtcgccaggacaatggacttcctgagccctcatgggtcagcctgggaccccagccgggaagcaacctccctggggtcccagtcctatgaggatatgagaggaatcctgtatgcagccccccagctccgctccattcggggccagcctggacccaatcatgaggaagatgcagactcttatgagaacatggataatcccgatgggccagacccagcctggggaggagggggccgcatgggcacctggagcaccaggtgatcctcaggtggccagcctggatctcctcaagtccccaagattcacacctgactctgaaatctgaagacctcgagcagatgatgccaacctctggagcaatgttgcttaggatgtgtgcatgtgtgtaagtgtgtgtgtgtgtgtgtgtgtgtatacatgccagtgacacttccagtcccctttgtattccttaaataaactcaatgagctcttccaaaaaaaaaaaaaaaaaa

SEQ ID NO: 83 - DNA, 3103 bp, Homo sapiens
  gene (1)..(3103): Accession No. NM_000616
ccaggcctagggtgtggaggagccttgccatcgggcttcctgtctctcttcatttaagcacgactctgcagaaggaacaaagcaccctccccactgggctcctggttgcagagctccaagtcctcacacagatacgcctgtttgagaagcagcgggcaagaaagacgcaagcccagaggccctgccatttctgtgggctcaggtccctactggctcaggcccctgcctccctcggcaaggccacaatgaaccggggagtcccttttaggcacttgcttctggtgctgcaactggcgctcctcccagcagccactcagggaaagaaagtggtgctgggcaaaaaaggggatacagtggaactgacctgtacagcttcccagaagaagagcatacaattccactggaaaaactccaaccagataaagattctgggaaatcagggctccttcttaactaaaggtccatccaagctgaatgatcgcgctgactcaagaagaagcctttgggaccaaggaaactttcccctgatcatcaagaatcttaagatagaagactcagatacttacatctgtgaagtggaggaccagaaggaggaggtgcaattgctagtgttcggattgactgccaactctgacacccacctgcttcaggggcagagcctgaccctgaccttggagagcccccctggtagtagcccctcagtgcaatgtaggagtccaaggggtaaaaacatacagggggggaagaccctctccgtgtctcagctggagctccaggatagtggcacctggacatgcactgtcttgcagaaccagaagaaggtggagttcaaaatagacatcgtggtgctagctttccagaaggcctccagcatagtctataagaaagagggggaacaggtggagttctccttcccactcgcctttacagttgaaaagctgacgggcagtggcgagctgtggtggcaggcggagagggcttcctcctccaagtcttggatcacctttgacctgaagaacaaggaagtgtctgtaaaacgggttacccaggaccctaagctccagatgggcaagaagctcccgctccacctcaccctgccccaggccttgcctcagtatgctggctctggaaacctcaccctggcccttgaagcgaaaacaggaaagttgcatcaggaagtgaacctggtggtgatgagagccactcagctccagaaaaatttgacctgtgaggtgtggggacccacctcccctaagctgatgctgagtttgaaactggagaacaaggaggcaaaggtctcgaagcgggagaaggcggtgtgggtgctgaaccctgaggcggggatgtggcagtgtctgctgagtgactcgggacaggtcctgctggaatccaacatcaaggttctgcccacatggtccaccccggtgcagccaatggccctgattgtgctggggggcgtcgccggcctcctgcttttcattgggctaggcatcttcttctgtgtcaggtgccggcaccgaaggcgccaagcagagcggatgtctcagatcaagagactcctcagtgagaagaagacctgccagtgtcctcaccggtttcagaagacatgtagccccatttgaggcacgaggccaggcagatcccacttgcagcctccccaggtgtctgccccgcgtttcctgcctgcggaccagatgaatgtagcagatccccagcctctggcctcctgttcgcctcctctacaatttgccattgtttctcctgggttaggccccggcttcactggttgagtgttgctctctagtttccagaggcttaatcacaccgtcctccacgccatttccttttccttcaagcctagcccttctctcattatttctctctgaccctctccccactgctcatttggatcccaggggagtgttcagggccagccctggctggcatggagggtgaggctgggtgtctggaagcatggagcatgggactgttcttttacaagacaggaccctgggaccacagagggcaggaacttgcacaaaatcacacagccaagccagtcaaggatggatgcagatccagaggtttctggcagccagtacctcctgccccatgctgcccgcttctcaccctatgtgggtgggaccacagactcacatcctgaccttgcacaaacagcccctctggacacagccccatgtacacggcctcaagggatgtctcacatcctctgtctatttgagacttagaaaaatcctacaaggctggcagtgacagaactaagatgatcatctccagtttatagaccagaaccagagctcagagaggctagatgattgattaccaagtgccggactagcaagtgctggagtcgggactaacccaggtcccttgtcccaagttccactgctgcctcttgaatgcagggacaaatgccacacggctctcaccagtggctagtggtgggtactcaatgtgtacttttgggttcacagaagcacagcacccatgggaagggtccatctcagagaatttacgagcagggatgaaggcctccctgtctaaaatccctccttcatcccccgctggtggcagaatctgttaccagaggacaaagcctttggctcttctaatcagagcgcaagctgggagcacaggcactgcaggagagaatgcccagtgaccagtcactgaccctgtgcagaacctcctggaagcgagctttgctgggagagggggtagctagcctgagagggaaccctctaagggacctcaaaggtgattgtgccaggctctgcgcctgccccacaccctcccttaccctcctccagaccattcaggacacagggaaatcagggttacaaatcttcttgatccacttctctcaggatcccctctcttcctacccttcctcaccacttccctcagtcccaactccttttccctatttccttctcctcctgtctttaaagcctgcctcttccaggaagacccccctattgctgctggggctccccatttgcttactttgcatttgtgcccactctccacccctgctcccctgagctgaaataaaaatacaataaacttactataaagatgc

SEQ ID NO: 84 - DNA, 2797 bp, Homo sapiens
  gene (1)..(2797): Accession No. NM_006889
aggagccttaggaggtacggggagctcgcaaatactccttttggtttattcttaccaccttgcttctgtgttccttgggaatgctgctgtgcttatgcatctggtctctttttggagctacagtggacaggcatttgtgacagcactatgggactgagtaacattctctttgtgatggccttcctgctctctggtgctgctcctctgaagattcaagcttatttcaatgagactgcagacctgccatgccaatttgcaaactctcaaaaccaaagcctgagtgagctagtagtattttggcaggaccaggaaaacttggttctgaatgaggtatacttaggcaaagagaaatttgacagtgttcattccaagtatatgggccgcacaagttttgattcggacagttggaccctgagacttcacaatcttcagatcaaggacaagggcttgtatcaatgtatcatccatcacaaaaagcccacaggaatgattcgcatccaccagatgaattctgaactgtcagtgcttgctaacttcagtcaacctgaaatagtaccaatttctaatataacagaaaatgtgtacataaatttgacctgctcatctatacacggttacccagaacctaagaagatgagtgttttgctaagaaccaagaattcaactatcgagtatgatggtgttatgcagaaatctcaagataatgtcacagaactgtacgacgtttccatcagcttgtctgtttcattccctgatgttacgagcaatatgaccatcttctgtattctggaaactgacaagacgcggcttttatcttcacctttctctatagagcttgaggaccctcagcctcccccagaccacattccttggattacagctgtacttccaacagttattatatgtgtgatggttttctgtctaattctatggaaatggaagaagaagaagcggcctcgcaactcttataaatgtggaaccaacacaatggagagggaagagagtgaacagaccaagaaaagagaaaaaatccatatacctgaaagatctgatgaagcccagcgtgtttttaaaagttcgaagacatcttcatgcgacaaaagtgatacatgtttttaattaaagagtaaagcccatacaagtattcattttttctaccctttcctttgtaagttcctgggcaacctttttgatttcttccagaaggcaaaaagacattaccatgagtaataagggggctccaggactccctctaagtggaatagcctccctgtaactccagctctgctccgtatgccaagaggagactttaattctcttactgcttcttttcacttcagagcacacttatgggccaagcccagcttaatggctcatgacctggaaataaaatttaggaccaatacctcctccagatcagattcttctcttaatttcatagattgtgttttttttttaaatagacctctcaatttctggaaaactgccttttatctgcccagaattctaagctggtgccccactgaattttgtgtgtacctgtgactaaacaactacctcctcagtctgggtgggacttatgtatttatgaccttatagtgttaatatcttgaaacatagagatctatgtactgtaatagtgtgattactatgctctagagaaaagtctacccctgctaaggagttctcatccctctgtcagggtcagtaaggaaaacggtggcctagggtacaggcaacaatgagcagaccaacctaaatttggggaaattaggagaggcagagatagaacctggagccacttctatctgggctgttgctaatattgaggaggcttgccccacccaacaagccatagtggagagaactgaataaacaggaaaatgccagagcttgtgaaccctgtttctcttgaagaactgactagtgagatggcctggggaagctgtgaaagaaccaaaagagatcacaatactcaaaagagagagagagagaaaaaagagagatcttgatccacagaaatacatgaaatgtctggtctgtccaccccatcaacaagtcttgaaacaagcaacagatggatagtctgtccaaatggacataagacagacagcagtttccctggtggtcagggaggggttttggtgatacccaagttattgggatgtcatcttcctggaagcagagctggggagggagagccatcaccttgataatgggatgaatggaaggaggcttaggactttccactcctggctgagagaggaagagctgcaacggaattaggaagaccaagacacagatcacccggggcttacttagcctacagatgtcctacgggaacgtgggctggcccagcatagggctagcaaatttgagttggatgattgtttttgctcaaggcaaccagaggaaacttgcatacagagacagatatactgggagaaatgactttgaaaacctggctctaaggtgggatcactaagggatggggcagtctctgcccaaacataaagagaactctggggagcctgagccacaaaaatgttcctttattttatgtaaaccctcaagggttatagactgccatgctagacaagcttgtccatgtaatattcccatgtttttaccctgcccctgccttgattagactcctagcacctggctagtttctaacatgttttgtgcagcacagtttttaataaatgcttgttacattcaaaaaaaaaaaaaaaaaaaaaaaaaaaaaaaaaaaaaaaaaaaaaaaaaaaaaaaaaaaaaaaaaaaaaaaaaaaaa

SEQ ID NO: 85 - DNA, 3035 bp, Homo sapiens
  gene (1)..(3035): Accession No. NM_001768
agcacccaagggctggtcaaccaagctgggggttgaatttccatccagcaatgcaggccatgggaggctgcagcagtgacgctgtcagatcccctttgtgagaataataatttttataacaacgtggctggaggactgatcaggagagagactggtgtgaattgaaggctgttgcaatggctccaagaagagatgaggctgtgtggtgagtttagccgctggatgaaaggccggaagaatgaggtcagcagcgcactgacaccgacacccaaagcttcggctgctgccgctctcatggaaatctcctgggggaagggagagggtccttcctcggtgaaaactggggctgctctagcgagttcctcagaagcgggcaggtcgctagttcctcttccttttcagccctcagtgcccattttgccaataaaaagtcccaaggtgacagtacaagagacgcctttagtgaaggcaaaggaagggacactcccctcctttgctgcctactctcgccctcacttcttgaaatctttggtctcccttcacccactctgtcactctcacaagacaaccatttccaaggactatttccaagcccttttcctcatccccaaacccgcagttttcagctgcccccagttgcctggccaggctgcctcgacggccctattcacgggccccagcctcctcgccgggctggaaggcgacaaccgcgaaaaggagggtgactctcctcggcgggggcttcgggtgacatcacatcctccaaatgcgaaatcaggctccgggccggccgaagggcgcaactttcccccctcggcgccccaccggctcccgcgcgcctcccctcgcgcccgagcttcgagccaagcagcgtcctggggagcgcgtcatggccttaccagtgaccgccttgctcctgccgctggccttgctgctccacgccgccaggccgagccagttccgggtgtcgccgctggatcggacctggaacctgggcgagacagtggagctgaagtgccaggtgctgctgtccaacccgacgtcgggctgctcgtggctcttccagccgcgcggcgccgccgccagtcccaccttcctcctatacctctcccaaaacaagcccaaggcggccgaggggctggacacccagcggttctcgggcaagaggttgggggacaccttcgtcctcaccctgagcgacttccgccgagagaacgagggctactatttctgctcggccctgagcaactccatcatgtacttcagccacttcgtgccggtcttcctgccagcgaagcccaccacgacgccagcgccgcgaccaccaacaccggcgcccaccatcgcgtcgcagcccctgtccctgcgcccagaggcgtgccggccagcggcggggggcgcagtgcacacgagggggctggacttcgcctgtgatatctacatctgggcgcccttggccgggacttgtggggtccttctcctgtcactggttatcaccctttactgcaaccacaggaaccgaagacgtgtttgcaaatgtccccggcctgtggtcaaatcgggagacaagcccagcctttcggcgagatacgtctaaccctgtgcaacagccactacattacttcaaactgagatccttccttttgagggagcaagtccttccctttcattttttccagtcttcctccctgtgtattcattctcatgattattattttagtgggggcggggtgggaaagattactttttctttatgtgtttgacgggaaacaaaactaggtaaaatctacagtacaccacaagggtcacaatactgttgtgcgcacatcgcggtagggcgtggaaaggggcaggccagagctacccgcagagttctcagaatcatgctgagagagctggaggcacccatgccatctcaacctcttccccgcccgttttacaaagggggaggctaaagcccagagacagcttgatcaaaggcacacagcaagtcagggttggagcagtagctggagggaccttgtctcccagctcagggctctttcctccacaccattcaggtctttctttccgaggcccctgtctcagggtgaggtgcttgagtctccaacggcaagggaacaagtacttcttgatacctgggatactgtgcccagagcctcgaggaggtaatgaattaaagaagagaactgcctttggcagagttctataatgtaaacaatatcagactttttttttttataatcaagcctaaaattgtatagacctaaaataaaatgaagtggtgagcttaaccctggaaaatgaatccctctatctctaaagaaaatctctgtgaaacccctatgtggaggcggaattgctctcccagcccttgcattgcagaggggcccatgaaagaggacaggctacccctttacaaatagaatttgagcatcagtgaggttaaactaaggccctcttgaatctctgaatttgagatacaaacatgttcctgggatcactgatgactttttatactttgtaaagacaattgttggagagcccctcacacagccctggcctctgctcaactagcagatacagggatgaggcagacctgactctcttaaggaggctgagagcccaaactgctgtcccaaacatgcacttccttgcttaaggtatggtacaagcaatgcctgcccattggagagaaaaaacttaagtagataaggaaataagaaccactcataattcttcaccttaggaataatctcctgttaatatggtgtacattcttcctgattattttctacacatacatgtaaaatatgtctttcttttttaaatagggttgtactatgctgttatgagtggctttaatgaataaacatttgtagcatcctctttaatgggtaaacagcatccgaaaaaaaaaaaaaaaaaaaaaaaaaaaaaaaaaaaaaaaaaaaaaaaaaaaaaaaaaaaaaaaaaaaaaaaaaaaaaaaaaaaaaaaaaaaaaaaaaaaaaaaaaaaaaaaaaaaaaaaaaaaa

SEQ ID NO: 86 - DNA, 781 bp, Homo sapiens
  gene (1)..(781): Accession No. NM_000758
acacagagagaaaggctaaagttctctggaggatgtggctgcagagcctgctgctcttgggcactgtggcctgcagcatctctgcacccgcccgctcgcccagccccagcacgcagccctgggagcatgtgaatgccatccaggaggcccggcgtctcctgaacctgagtagagacactgctgctgagatgaatgaaacagtagaagtcatctcagaaatgtttgacctccaggagccgacctgcctacagacccgcctggagctgtacaagcagggcctgcggggcagcctcaccaagctcaagggccccttgaccatgatggccagccactacaagcagcactgccctccaaccccggaaacttcctgtgcaacccagattatcacctttgaaagtttcaaagagaacctgaaggactttctgcttgtcatcccctttgactgctgggagccagtccaggagtgagaccggccagatgaggctggccaagccggggagctgctctctcatgaaacaagagctagaaactcaggatggtcatcttggagggaccaaggggtgggccacagccatggtgggagtggcctggacctgccctgggccacactgaccctgatacaggcatggcagaagaatgggaatattttatactgacagaaatcagtaatatttatatatttatatttttaaaatatttatttatttatttatttaagttcatattccatatttattcaagatgttttaccgtaataattattattaaaaatatgcttcta

SEQ ID NO: 87 - DNA, 1988 bp, Homo sapiens
  gene (1)..(1988): Accession No. NM_005214
gccttctgtgtgtgcacatgtgtaatacatatctgggatcaaagctatctatataaagtccttgattctgtgtgggttcaaacacatttcaaagcttcaggatcctgaaaggttttgctctacttcctgaagacctgaacaccgctcccataaagccatggcttgccttggatttcagcggcacaaggctcagctgaacctggctaccaggacctggccctgcactctcctgttttttcttctcttcatccctgtcttctgcaaagcaatgcacgtggcccagcctgctgtggtactggccagcagccgaggcatcgccagctttgtgtgtgagtatgcatctccaggcaaagccactgaggtccgggtgacagtgcttcggcaggctgacagccaggtgactgaagtctgtgcggcaacctacatgatggggaatgagttgaccttcctagatgattccatctgcacgggcacctccagtggaaatcaagtgaacctcactatccaaggactgagggccatggacacgggactctacatctgcaaggtggagctcatgtacccaccgccatactacctgggcataggcaacggaacccagatttatgtaattgatccagaaccgtgcccagattctgacttcctcctctggatccttgcagcagttagttcggggttgtttttttatagctttctcctcacagctgtttctttgagcaaaatgctaaagaaaagaagccctcttacaacaggggtctatgtgaaaatgcccccaacagagccagaatgtgaaaagcaatttcagccttattttattcccatcaattgagaaaccattatgaagaagagagtccatatttcaatttccaagagctgaggcaattctaacttttttgctatccagctatttttatttgtttgtgcatttggggggaattcatctctctttaatataaagttggatgcggaacccaaattacgtgtactacaatttaaagcaaaggagtagaaagacagagctgggatgtttctgtcacatcagctccactttcagtgaaagcatcacttgggattaatatggggatgcagcattatgatgtgggtcaaggaattaagttagggaatggcacagcccaaagaaggaaaaggcagggagcgagggagaagactatattgtacacaccttatatttacgtatgagacgtttatagccgaaatgatcttttcaagttaaattttatgccttttatttcttaaacaaatgtatgattacatcaaggcttcaaaaatactcacatggctatgttttagccagtgatgctaaaggttgtattgcatatatacatatatatatatatatatatatatatatatatatatatatatatatatatatatattttaatttgatagtattgtgcatagagccacgtatgtttttgtgtatttgttaatggtttgaatataaacactatatggcagtgtctttccaccttgggtcccagggaagttttgtggaggagctcaggacactaatacaccaggtagaacacaaggtcatttgctaactagcttggaaactggatgaggtcatagcagtgcttgattgcgtggaattgtgctgagttggtgttgacatgtgctttggggcttttacaccagttcctttcaatggtttgcaaggaagccacagctggtggtatctgagttgacttgacagaacactgtcttgaagacaatggcttactccaggagacccacaggtatgaccttctaggaagctccagttcgatgggcccaattcttacaaacatgtggttaatgccatggacagaagaaggcagcaggtggcagaatggggtgcatgaaggtttctgaaaattaacactgcttgtgtttttaactcaatattttccatgaaaatgcaacaacatgtataatatttttaattaaataaaaatctgtggtggtcgttttaaaaaaaaaaa

SEQ ID NO: 88 - DNA, 1184 bp, Homo sapiens
  gene (1)..(1184): Accession No. NM_001565
gggggagacattcctcaattgcttagacatattctgagcctacagcagaggaacctccagtctcagcaccatgaatcaaactgccattctgatttgctgccttatctttctgactctaagtggcattcaaggagtacctctctctagaactgtacgctgtacctgcatcagcattagtaatcaacctgttaatccaaggtctttagaaaaacttgaaattattcctgcaagccaattttgtccacgtgttgagatcattgctacaatgaaaaagaagggtgagaagagatgtctgaatccagaatcgaaggccatcaagaatttactgaaagcagttagcaaggaaaggtctaaaagatctccttaaaaccagaggggagcaaaatcgatgcagtgcttccaaggatggaccacacagaggctgcctctcccatcacttccctacatggagtatatgtcaagccataattgttcttagtttgcagttacactaaaaggtgaccaatgatggtcaccaaatcagctgctactactcctgtaggaaggttaatgttcatcatcctaagctattcagtaataactctaccctggcactataatgtaagctctactgaggtgctatgttcttagtggatgttctgaccctgcttcaaatatttccctcacctttcccatcttccaagggtactaaggaatctttctgctttggggtttatcagaattctcagaatctcaaataactaaaaggtatgcaatcaaatctgctttttaaagaatgctctttacttcatggacttccactgccatcctcccaaggggcccaaattctttcagtggctacctacatacaattccaaacacatacaggaaggtagaaatatctgaaaatgtatgtgtaagtattcttatttaatgaaagactgtacaaagtagaagtcttagatgtatatatttcctatattgttttcagtgtacatggaataacatgtaattaagtactatgtatcaatgagtaacaggaaaattttaaaaatacagatagatatatgctctgcatgttacataagataaatgtgctgaatggttttcaaaataaaaatgaggtactctcctggaaatattaagaaagactatctaaatgttgaaagatcaaaaggttaataaagtaattataactaaaaaaa

SEQ ID NO: 89 - DNA, 1670 bp, Homo sapiens
  gene (1)..(1670): Accession No. NM_001504
ccaaccacaagcaccaaagcagaggggcaggcagcacaccacccagcagccagagcaccagcccagccatggtccttgaggtgagtgaccaccaagtgctaaatgacgccgaggttgccgccctcctggagaacttcagctcttcctatgactatggagaaaacgagagtgactcgtgctgtacctccccgccctgcccacaggacttcagcctgaacttcgaccgggccttcctgccagccctctacagcctcctctttctgctggggctgctgggcaacggcgcggtggcagccgtgctgctgagccggcggacagccctgagcagcaccgacaccttcctgctccacctagctgtagcagacacgctgctggtgctgacactgccgctctgggcagtggacgctgccgtccagtgggtctttggctctggcctctgcaaagtggcaggtgccctcttcaacatcaacttctacgcaggagccctcctgctggcctgcatcagctttgaccgctacctgaacatagttcatgccacccagctctaccgccgggggcccccggcccgcgtgaccctcacctgcctggctgtctgggggctctgcctgcttttcgccctcccagacttcatcttcctgtcggcccaccacgacgagcgcctcaacgccacccactgccaatacaacttcccacaggtgggccgcacggctctgcgggtgctgcagctggtggctggctttctgctgcccctgctggtcatggcctactgctatgcccacatcctggccgtgctgctggtttccaggggccagcggcgcctgcgggccatgcggctggtggtggtggtcgtggtggcctttgccctctgctggaccccctatcacctggtggtgctggtggacatcctcatggacctgggcgctttggcccgcaactgtggccgagaaagcagggtagacgtggccaagtcggtcacctcaggcctgggctacatgcactgctgcctcaacccgctgctctatgcctttgtaggggtcaagttccgggagcggatgtggatgctgctcttgcgcctgggctgccccaaccagagagggctccagaggcagccatcgtcttcccgccgggattcatcctggtctgagacctcagaggcctcctactcgggcttgtgaggccggaatccgggctcccctttcgcccacagtctgacttccccgcattccaggctcctccctccctctgccggctctggctctccccaatatcctcgctcccgggactcactggcagccccagcaccaccaggtctcccgggaagccaccctcccagctctgaggactgcaccattgctgctccttagctgccaagccccatcctgccgcccgaggtggctgcctggagccccactgcccttctcatttggaaactaaaacttcatcttccccaagtgcggggagtacaaggcatggcgtagagggtgctgccccatgaagccacagcccaggcctccagctcagcagtgactgtggccatggtccccaagacctctatatttgctcttttatttttatgtctaaaatcctgcttaaaacttttcaataaacaagatcgtcaggaccaaaaaaaaaaaaaaaaaaaaaaaaaaaaaaaaaaaaaaaaaaaaaaa

SEQ ID NO: 90 - DNA, 3913 bp, Homo sapiens
  gene (1)..(3913): Accession No. NM_001935
ctttcactggcaagagacggagtcctgggtttcagttccagttgcctgcggtgggctgtgtgagtttgccaaagtcccctgccctctctgggtctcggttccctcgcctgtccacgtgaggttggaggagctgaacgccgacgtcatttttagctaagagggagcagggtccccgagtcgccggcccagggtctgcgcatccgaggccgcgcgccctttcccctcccccacggctcctccgggccccgcactctgcgccccggctgccgcccagcgccctacaccgccctcagggggccctcgcgggctccccccggccgggatgccagtgccccgcgccacgcgcgcctgctcccgcgccgcctgccctgcagcctgcccgcggcgcctttatacccagcgggctcggcgctcactaatgtttaactcggggccgaaacttgccagcggcgagtgactccaccgcccggagcagcggtgcaggacgcgcgtctccgccgcccgcggtgacttctgcctgcgctccttctctgaacgctcacttccgaggagacgccgacgatgaagacaccgtggaaggttcttctgggactgctgggtgctgctgcgcttgtcaccatcatcaccgtgcccgtggttctgctgaacaaaggcacagatgatgctacagctgacagtcgcaaaacttacactctaactgattacttaaaaaatacttatagactgaagttatactccttaagatggatttcagatcatgaatatctctacaaacaagaaaataatatcttggtattcaatgctgaatatggaaacagctcagttttcttggagaacagtacatttgatgagtttggacattctatcaatgattattcaatatctcctgatgggcagtttattctcttagaatacaactacgtgaagcaatggaggcattcctacacagcttcatatgacatttatgatttaaataaaaggcagctgattacagaagagaggattccaaacaacacacagtgggtcacatggtcaccagtgggtcataaattggcatatgtttggaacaatgacatttatgttaaaattgaaccaaatttaccaagttacagaatcacatggacggggaaagaagatataatatataatggaataactgactgggtttatgaagaggaagtcttcagtgcctactctgctctgtggtggtctccaaacggcacttttttagcatatgcccaatttaacgacacagaagtcccacttattgaatactccttctactctgatgagtcactgcagtacccaaagactgtacgggttccatatccaaaggcaggagctgtgaatccaactgtaaagttctttgttgtaaatacagactctctcagctcagtcaccaatgcaacttccatacaaatcactgctcctgcttctatgttgataggggatcactacttgtgtgatgtgacatgggcaacacaagaaagaatttctttgcagtggctcaggaggattcagaactattcggtcatggatatttgtgactatgatgaatccagtggaagatggaactgcttagtggcacggcaacacattgaaatgagtactactggctgggttggaagatttaggccttcagaacctcattttacccttgatggtaatagcttctacaagatcatcagcaatgaagaaggttacagacacatttgctatttccaaatagataaaaaagactgcacatttattacaaaaggcacctgggaagtcatcgggatagaagctctaaccagtgattatctatactacattagtaatgaatataaaggaatgccaggaggaaggaatctttataaaatccaacttagtgactatacaaaagtgacatgcctcagttgtgagctgaatccggaaaggtgtcagtactattctgtgtcattcagtaaagaggcgaagtattatcagctgagatgttccggtcctggtctgcccctctatactctacacagcagcgtgaatgataaagggctgagagtcctggaagacaattcagctttggataaaatgctgcagaatgtccagatgccctccaaaaaactggacttcattattttgaatgaaacaaaattttggtatcagatgatcttgcctcctcattttgataaatccaagaaatatcctctactattagatgtgtatgcaggcccatgtagtcaaaaagcagacactgtcttcagactgaactgggccacttaccttgcaagcacagaaaacattatagtagctagctttgatggcagaggaagtggttaccaaggagataagatcatgcatgcaatcaacagaagactgggaacatttgaagttgaagatcaaattgaagcagccagacaattttcaaaaatgggatttgtggacaacaaacgaattgcaatttggggctggtcatatggagggtacgtaacctcaatggtcctgggatcgggaagtggcgtgttcaagtgtggaatagccgtggcgcctgtatcccggtgggagtactatgactcagtgtacacagaacgttacatgggtctcccaactccagaagacaaccttgaccattacagaaattcaacagtcatgagcagagctgaaaattttaaacaagttgagtacctccttattcatggaacagcagatgataacgttcactttcagcagtcagctcagatctccaaagccctggtcgatgttggagtggatttccaggcaatgtggtatactgatgaagaccatggaatagctagcagcacagcacaccaacatatatatacccacatgagccacttcataaaacaatgtttctctttaccttagcacctcaaaataccatgccatttaaagcttattaaaactcatttttgttttcattatctcaaaactgcactgtcaagatgatgatgatctttaaaatacacactcaaatcaagaaacttaaggttacctttgttcccaaatttcatacctatcatcttaagtagggacttctgtcttcacaacagattattaccttacagaagtttgaattatccggtcgggttttattgtttaaaatcatttctgcatcagctgctgaaacaacaaataggaattgtttttatggaggctttgcatagattccctgagcaggattttaatctttttctaactggactggttcaaatgttgttctcttctttaaagggatggcaagatgtgggcagtgatgtcactagggcagggacaggataagagggattagggagagaagatagcagggcatggctgggaacccaagtccaagcataccaacacgagcaggctactgtcagctcccctcggagaagagctgttcacagccagactggcacagttttctgagaaagactattcaaacagtctcaggaaatcaaatatgcaaagcactgacttctaagtaaaaccacagcagttgaaaagactccaaagaaatgtaagggaaactgccagcaacgcaggcccccaggtgccagttatggctataggtgctacaaaaacacagcaagggtgatgggaaagcattgtaaatgtgcttttaaaaaaaaatactgatgttcctagtgaaagaggcagcttgaaactgagatgtgaacacatcagcttgccctgttaaaagatgaaaatatttgtatcacaaatcttaacttgaaggagtccttgcatcaatttttcttatttcatttctttgagtgtcttaattaaaagaatattttaacttccttggactcattttaaaaaatggaacataaaatacaatgttatgtattattattcccattctacatactatggaatttctcccagtcatttaataaatgtgccttcattttttcagaaaaaaaaaaaaaaa

SEQ ID NO: 91 - DNA, 3136 bp, Homo sapiens
  gene (1)..(3136): Accession No. NM_001964
gcgcagaacttggggagccgccgccgccatccgccgccgcagccagcttccgccgccgcaggaccggcccctgccccagcctccgcagccgcggcgcgtccacgcccgcccgcgcccagggcgagtcggggtcgccgcctgcacgcttctcagtgttccccgcgccccgcatgtaacccggccaggcccccgcaactgtgtcccctgcagctccagccccgggctgcacccccccgccccgacaccagctctccagcctgctcgtccaggatggccgcggccaaggccgagatgcagctgatgtccccgctgcagatctctgacccgttcggatcctttcctcactcgcccaccatggacaactaccctaagctggaggagatgatgctgctgagcaacggggctccccagttcctcggcgccgccggggccccagagggcagcggcagcaacagcagcagcagcagcagcgggggcggtggaggcggcgggggcggcagcaacagcagcagcagcagcagcaccttcaaccctcaggcggacacgggcgagcagccctacgagcacctgaccgcagagtcttttcctgacatctctctgaacaacgagaaggtgctggtggagaccagttaccccagccaaaccactcgactgccccccatcacctatactggccgcttttccctggagcctgcacccaacagtggcaacaccttgtggcccgagcccctcttcagcttggtcagtggcctagtgagcatgaccaacccaccggcctcctcgtcctcagcaccatctccagcggcctcctccgcctccgcctcccagagcccacccctgagctgcgcagtgccatccaacgacagcagtcccatttactcagcggcacccaccttccccacgccgaacactgacattttccctgagccacaaagccaggccttcccgggctcggcagggacagcgctccagtacccgcctcctgcctaccctgccgccaagggtggcttccaggttcccatgatccccgactacctgtttccacagcagcagggggatctgggcctgggcaccccagaccagaagcccttccagggcctggagagccgcacccagcagccttcgctaacccctctgtctactattaaggcctttgccactcagtcgggctcccaggacctgaaggccctcaataccagctaccagtcccagctcatcaaacccagccgcatgcgcaagtaccccaaccggcccagcaagacgcccccccacgaacgcccttacgcttgcccagtggagtcctgtgatcgccgcttctcccgctccgacgagctcacccgccacatccgcatccacacaggccagaagcccttccagtgccgcatctgcatgcgcaacttcagccgcagcgaccacctcaccacccacatccgcacccacacaggcgaaaagcccttcgcctgcgacatctgtggaagaaagtttgccaggagcgatgaacgcaagaggcataccaagatccacttgcggcagaaggacaagaaagcagacaaaagtgttgtggcctcttcggccacctcctctctctcttcctacccgtccccggttgctacctcttacccgtccccggttactacctcttatccatccccggccaccacctcatacccatcccctgtgcccacctccttctcctctcccggctcctcgacctacccatcccctgtgcacagtggcttcccctccccgtcggtggccaccacgtactcctctgttccccctgctttcccggcccaggtcagcagcttcccttcctcagctgtcaccaactccttcagcgcctccacagggctttcggacatgacagcaaccttttctcccaggacaattgaaatttgctaaagggaaaggggaaagaaagggaaaagggagaaaaagaaacacaagagacttaaaggacaggaggaggagatggccataggagaggagggttcctcttaggtcagatggaggttctcagagccaagtcctccctctctactggagtggaaggtctattggccaacaatcctttctgcccacttccccttccccaattactattccctttgacttcagctgcctgaaacagccatgtccaagttcttcacctctatccaaagaacttgatttgcatggattttggataaatcatttcagtatcatctccatcatatgcctgaccccttgctcccttcaatgctagaaaatcgagttggcaaaatggggtttgggcccctcagagccctgccctgcacccttgtacagtgtctgtgccatggatttcgtttttcttggggtactcttgatgtgaagataatttgcatattctattgtattatttggagttaggtcctcacttgggggaaaaaaaaaaaagaaaagccaagcaaaccaatggtgatcctctattttgtgatgatgctgtgacaataagtttgaacctttttttttgaaacagcagtcccagtattctcagagcatgtgtcagagtgttgttccgttaacctttttgtaaatactgcttgaccgtactctcacatgtggcaaaatatggtttggtttttctttttttttttttttgaaagtgttttttcttcgtccttttggtttaaaaagtttcacgtcttggtgccttttgtgtgatgcgccttgctgatggcttgacatgtgcaattgtgagggacatgctcacctctagccttaaggggggcagggagtgatgatttgggggaggctttgggagcaaaataaggaagagggctgagctgagcttcggttctccagaatgtaagaaaacaaaatctaaaacaaaatctgaactctcaaaagtctatttttttaactgaaaatgtaaatttataaatatattcaggagttggaatgttgtagttacctactgagtaggcggcgatttttgtatgttatgaacatgcagttcattattttgtggttctattttactttgtacttgtgtttgcttaaacaaagtgactgtttggcttataaacacattgaatgcgctttattgcccatgggatatgtggtgtatatccttccaaaaaattaaaacgaaaataaagtagctgcgattggg

SEQ ID NO: 92 - DNA, 938 bp, Homo sapiens
  gene (1)..(938): Accession No. NM_001972
gcacggaggggcagagaccccggagccccagccccaccatgaccctcggccgccgactcgcgtgtcttttcctcgcctgtgtcctgccggccttgctgctggggggcaccgcgctggcctcggagattgtggggggccggcgagcgcggccccacgcgtggcccttcatggtgtccctgcagctgcgcggaggccacttctgcggcgccaccctgattgcgcccaacttcgtcatgtcggccgcgcactgcgtggcgaatgtaaacgtccgcgcggtgcgggtggtcctgggagcccataacctctcgcggcgggagcccacccggcaggtgttcgccgtgcagcgcatcttcgaaaacggctacgaccccgtaaacttgctcaacgacatcgtgattctccagctcaacgggtcggccaccatcaacgccaacgtgcaggtggcccagctgccggctcagggacgccgcctgggcaacggggtgcagtgcctggccatgggctggggccttctgggcaggaaccgtgggatcgccagcgtcctgcaggagctcaacgtgacggtggtgacgtccctctgccgtcgcagcaacgtctgcactctcgtgaggggccggcaggccggcgtctgtttcggggactccggcagccccttggtctgcaacgggctaatccacggaattgcctccttcgtccggggaggctgcgcctcagggctctaccccgatgcctttgccccggtggcacagtttgtaaactggatcgactctatcatccaacgctccgaggacaacccctgtccccacccccgggacccggacccggccagcaggacccactgagaagggctgcccgggtcacctcagctgcccacacccacactctccagcatctggcacaataaacattctctgttttgtagaaaaaaaaaaaaaaaa

SEQ ID NO: 93 - DNA, 941 bp, Homo sapiens
  gene (1)..(941): Accession No. NM_004131
ccaagagctaaaagagagcaaggaggaaacaacagcagctccaaccagggcagccttcctgagaagatgcaaccaatcctgcttctgctggccttcctcctgctgcccagggcagatgcaggggagatcatcgggggacatgaggccaagccccactcccgcccctacatggcttatcttatgatctgggatcagaagtctctgaagaggtgcggtggcttcctgatacgagacgacttcgtgctgacagctgctcactgttggggaagctccataaatgtcaccttgggggcccacaatatcaaagaacaggagccgacccagcagtttatccctgtgaaaagacccatcccccatccagcctataatcctaagaacttctccaacgacatcatgctactgcagctggagagaaaggccaagcggaccagagctgtgcagcccctcaggctacctagcaacaaggcccaggtgaagccagggcagacatgcagtgtggccggctgggggcagacggcccccctgggaaaacactcacacacactacaagaggtgaagatgacagtgcaggaagatcgaaagtgcgaatctgacttacgccattattacgacagtaccattgagttgtgcgtgggggacccagagattaaaaagacttcctttaagggggactctggaggccctcttgtgtgtaacaaggtggcccagggcattgtctcctatggacgaaacaatggcatgcctccacgagcctgcaccaaagtctcaagctttgtacactggataaagaaaaccatgaaacgctactaactacaggaagcaaactaagcccccgctgtaatgaaacaccttctctggagccaagtccagatttacactgggagaggtgccagcaactgaataaatacctcttagctgagtggaaaaaaaaaaaaaaaaaa

SEQ ID NO: 94 - DNA, 1267 bp, Homo sapiens
  gene (1)..(1267): Accession No. NM_019111
acattctcttttcttttattcttgtctgttctgcctcactcccgagctctactgactcccaacagagcgcccaagaagaaaatggccataagtggagtccctgtgctaggatttttcatcatagctgtgctgatgagcgctcaggaatcatgggctatcaaagaagaacatgtgatcatccaggccgagttctatctgaatcctgaccaatcaggcgagtttatgtttgactttgatggtgatgagattttccatgtggatatggcaaagaaggagacggtctggcggcttgaagaatttggacgatttgccagctttgaggctcaaggtgcattggccaacatagctgtggacaaagccaacctggaaatcatgacaaagcgctccaactatactccgatcaccaatgtacctccagaggtaactgtgctcacgaacagccctgtggaactgagagagcccaacgtcctcatctgtttcatagacaagttcaccccaccagtggtcaatgtcacgtggcttcgaaatggaaaacctgtcaccacaggagtgtcagagacagtcttcctgcccagggaagaccaccttttccgcaagttccactatctccccttcctgccctcaactgaggacgtttacgactgcagggtggagcactggggcttggatgagcctcttctcaagcactgggagtttgatgctccaagccctctcccagagactacagagaacgtggtgtgtgccctgggcctgactgtgggtctggtgggcatcattattgggaccatcttcatcatcaagggattgcgcaaaagcaatgcagcagaacgcagggggcctctgtaaggcacatggaggtgatggtgtttcttagagagaagatcactgaagaaacttctgctttaatggctttacaaagctggcaatattacaatccttgacctcagtgaaagcagtcatcttcagcattttccagccctatagccaccccaagtgtggatatgcctcttcgattgctccgtactctaacatctagctggcttccctgtctattgccttttcctgtatctattttcctctatttcctatcattttattatcaccatgcaatgcctctggaataaaacatacaggagtctgtctctgctatggaatgccccatggggcatctcttgtgtacttattgtttaaggtttcctcaaactgtgatttttctgaacacaataaactattttgatgatcttgggtggaaaaaaaaaaaaaaaaa

SEQ ID NO: 95 - DNA, 3428 bp, Homo sapiens
  gene (1)..(3428): Accession No. NM_002128
tggagagtaatgttacagagcggagagagtgaggaggctgcgtctggctcccgctctcacagccattgcagtacattgagctccatagagacagcgccggggcaagtgagagccggacgggcactgggcgactctgtgcctcgctgaggaaaaataactaaacatgggcaaaggagatcctaagaagccgagaggcaaaatgtcatcatatgcattttttgtgcaaacttgtcgggaggagcataagaagaagcacccagatgcttcagtcaacttctcagagttttctaagaagtgctcagagaggtggaagaccatgtctgctaaagagaaaggaaaatttgaagatatggcaaaagcggacaaggcccgttatgaaagagaaatgaaaacctatatccctcccaaaggggagacaaaaaagaagttcaaggatcccaatgcacccaagaggcctccttcggccttcttcctcttctgctctgagtatcgcccaaaaatcaaaggagaacatcctggcctgtccattggtgatgttgcgaagaaactgggagagatgtggaataacactgctgcagatgacaagcagccttatgaaaagaaggctgcgaagctgaaggaaaaatacgaaaaggatattgctgcatatcgagctaaaggaaagcctgatgcagcaaaaaagggagttgtcaaggctgaaaaaagcaagaaaaagaaggaagaggaggaagatgaggaagatgaagaggatgaggaggaggaggaagatgaagaagatgaagatgaagaagaagatgatgatgatgaataagttggttctagcgcagttttttttttcttgtctataaagcatttaacccccctgtacacaactcactccttttaaagaaaaaaattgaaatgtaaggctgtgtaagatttgtttttaaactgtacagtgtctttttttgtatagttaacacactaccgaatgtgtctttagatagccctgtcctggtggtattttcaatagccactaaccttgcctggtacagtatgggggttgtaaattggcatggaaatttaaagcaggttcttgttggtgcacagcacaaattagttatatatggggatggtagttttttcatcttcagttgtctctgatgcagcttatacgaaataattgttgttctgttaactgaataccactctgtaattgcaaaaaaaaaaaaaaagttgcagctgttttgttgacattctgaatgcttctaagtaaatacaattttttttattagtattgttgtccttttcataggtctgaaatttttcttcttgaggggaagctagtcttttgcttttgcccattttgaatcacatgaattattacagtgtttatcctttcatatagttagctaataaaaagcttttgtctacacaccctgcatatcataatgggggtaaagttaagttgagatagttttcatccataactgaacatccaaaatcttgatcagttaagaaatttcacatagcccacttacatttacaaactgaagagtaatcaatctactcaaagcatgggattattagaatcaaacattttgaaagtctgtccttgaaggactaatagaaaagtatgttctaacctttacatgaggactctattctttaactcccattaccatgtaatggcagttatattttgcagttcccacattaaagaagacctgagaatgtatccccaaaagcgtgagcttaaaatacaagactgccatattaaattttttgttgacattagtctcagtgaagactatgaaaatgctggctatagatgtcttttcccatttatctaaatatggactgctcaggaaacgagactttccattacaagtatttttaattaattgggccagcttttcaaacaaagatgccacattcaaaatagggtatattttcctatattacggtttgcccctttataaatccaagtagataggaagaaagaagacaaactttgcatctcagtatgaattattcaatttatttgaatgatttttctttacaaaacaaactcattcattagtcatgtttatctgcttaggagtttagggaacaatttggcaattttgtggttttcgagattatcgttttcttaaagtgccagtattttaaaatagcgttcttgtaattttacacgcttttgtgatggagtgctgttttgttatataatttagacttggattctttccatttgcatttgtttatgtaatttcaggaggaatactgaacatctgagtcctggatgatactaataaactaataattgcagaggttttaaatactagttaaatggctttcacttaagaacttaagattttgttacatatttttaaatcttgtttctaataatacctcttagcagtaccttttaaataagtataagggatggcaaagtttttccctttaaaaatactcactttatgcttataaataggttaatgggctgataaaaggttttgtcaaacattgcaagtattcggtgctatatataaaggaggaaaaactagttttactttcagaatgatttaaacaagatttttaaaaacaagatacatgcaagcgaacagcagggttagtgataggctgcaattgtgtcgaacatcagattttttgttaagaggagcaaatgactcaatctgatttagatggaagtttctactgtatagaaatcaccattaatcaccaacattaataattctgatccatttaaaatgaattctggctcaaggagaatttgtaactttagtaggtacgtcatgacaactaccatttttttaagatgttgagaatgggaacagtttttttagggtttattcttgaccacagatcttaagaaaatggacaaaacccctcttcaatctgaagattagtatggtttggtgttctaacagtatcccctagaagttggatgtctaaaactcaagtaaatggaagtgggaggcaatttagataagtgtaaagccttgtaactgaagatgattttttttagaaagtgtatagaaactattttaatgccaagatagttacagtgctgtggggtttaaagactttgttgacatcaagaaaagactaaatctataattaattgggccaacttttaaaatgaagatgctttttaaaactaatgaactaagatgtataaatcttagtttttttgtattttaaagataggcatatggcatattgattaacgagtcaaatttcctaactttgctgtgcaaaggttgagagctattgctgattagttaccacagttctgatgatcgtcccatcacagtgttgttaatgtttgctgtatttattaattttcttaaagtgaaatctgaaaaatgaaatttgtgtgtcctgtgtacccgaggggtaatgattaaatgataaagataagaaaa

SEQ ID NO: 96 - DNA, 1550 bp, Homo sapiens
  gene (1)..(1550): Accession No. NM_002133
tcaacgcctgcctcccctcgagcgtcctcagcgcagccgccgcccgcggagccagcacgaacgagcccagcaccggccggatggagcgtccgcaacccgacagcatgccccaggatttgtcagaggccctgaaggaggccaccaaggaggtgcacacccaggcagagaatgctgagttcatgaggaactttcagaagggccaggtgacccgagacggcttcaagctggtgatggcctccctgtaccacatctatgtggccctggaggaggagattgagcgcaacaaggagagcccagtcttcgcccctgtctacttcccagaagagctgcaccgcaaggctgccctggagcaggacctggccttctggtacgggccccgctggcaggaggtcatcccctacacaccagccatgcagcgctatgtgaagcggctccacgaggtggggcgcacagagcccgagctgctggtggcccacgcctacacccgctacctgggtgacctgtctgggggccaggtgctcaaaaagattgcccagaaagccctggacctgcccagctctggcgagggcctggccttcttcaccttccccaacattgccagtgccaccaagttcaagcagctctaccgctcccgcatgaactccctggagatgactcccgcagtcaggcagagggtgatagaagaggccaagactgcgttcctgctcaacatccagctctttgaggagttgcaggagctgctgacccatgacaccaaggaccagagcccctcacgggcaccagggcttcgccagcgggccagcaacaaagtgcaagattctgcccccgtggagactcccagagggaagcccccactcaacacccgctcccaggctccgcttctccgatgggtccttacactcagctttctggtggcgacagttgctgtagggctttatgccatgtgaatgcaggcatgctggctcccagggccatgaactttgtccggtggaaggccttctttctagagagggaattctcttggctggcttccttaccgtgggcactgaaggctttcagggcctccagccctctcactgtgtccctctctctggaaaggaggaaggagcctatggcatcttccccaacgaaaagcacatccaggcaatggcctaaacttcagagggggcgaaggggtcagccctgcccttcagcatcctcagttcctgcagcagagcctggaagacaccctaatgtggcagctgtctcaaacctccaaaagccctgagtttcaagtatccttgttgacacggccatgaccactttccccgtgggccatggcaatttttacacaaacctgaaaagatgttgtgtcttgtgtttttgtcttatttttgttggagccactctgttcctggctcagcctcaaatgcagtatttttgttgtgttctgttgtttttatagcagggttggggtggtttttgagccatgcgtgggtggggagggaggtgtttaacggcactgtggccttggtctaacttttgtgtgaaataataaacaacattgtctg

SEQ ID NO: 97 - DNA, 2445 bp, Homo sapiens
  gene (1)..(2445): Accession No. NM_005345
ataaaagcccaggggcaagcggtccggataacggctagcctgaggagctgctgcgacagtccactacctttttcgagagtgactcccgttgtcccaaggcttcccagagcgaacctgtgcggctgcaggcaccggcgcgtcgagtttccggcgtccggaaggaccgagctcttctcgcggatccagtgttccgtttccagcccccaatctcagagcggagccgacagagagcagggaaccggcatggccaaagccgcggcgatcggcatcgacctgggcaccacctactcctgcgtgggggtgttccaacacggcaaggtggagatcatcgccaacgaccagggcaaccgcaccacccccagctacgtggccttcacggacaccgagcggctcatcggggatgcggccaagaaccaggtggcgctgaacccgcagaacaccgtgtttgacgcgaagcggctgattggccgcaagttcggcgacccggtggtgcagtcggacatgaagcactggcctttccaggtgatcaacgacggagacaagcccaaggtgcaggtgagctacaagggggagaccaaggcattctaccccgaggagatctcgtccatggtgctgaccaagatgaaggagatcgccgaggcgtacctgggctacccggtgaccaacgcggtgatcaccgtgccggcctacttcaacgactcgcagcgccaggccaccaaggatgcgggtgtgatcgcggggctcaacgtgctgcggatcatcaacgagcccacggccgccgccatcgcctacggcctggacagaacgggcaagggggagcgcaacgtgctcatctttgacctgggcgggggcaccttcgacgtgtccatcctgacgatcgacgacggcatcttcgaggtgaaggccacggccggggacacccacctgggtggggaggactttgacaacaggctggtgaaccacttcgtggaggagttcaagagaaaacacaagaaggacatcagccagaacaagcgagccgtgaggcggctgcgcaccgcctgcgagagggccaagaggaccctgtcgtccagcacccaggccagcctggagatcgactccctgtttgagggcatcgacttctacacgtccatcaccagggcgaggttcgaggagctgtgctccgacctgttccgaagcaccctggagcccgtggagaaggctctgcgcgacgccaagctggacaaggcccagattcacgacctggtcctggtcgggggctccacccgcatccccaaggtgcagaagctgctgcaggacttcttcaacgggcgcgacctgaacaagagcatcaaccccgacgaggctgtggcctacggggcggcggtgcaggcggccatcctgatgggggacaagtccgagaacgtgcaggacctgctgctgctggacgtggctcccctgtcgctggggctggagacggccggaggcgtgatgactgccctgatcaagcgcaactccaccatccccaccaagcagacgcagatcttcaccacctactccgacaaccaacccggggtgctgatccaggtgtacgagggcgagagggccatgacgaaagacaacaatctgttggggcgcttcgagctgagcggcatccctccggcccccaggggcgtgccccagatcgaggtgaccttcgacatcgatgccaacggcatcctgaacgtcacggccacggacaagagcaccggcaaggccaacaagatcaccatcaccaacgacaagggccgcctgagcaaggaggagatcgagcgcatggtgcaggaggcggagaagtacaaagcggaggacgaggtgcagcgcgagagggtgtcagccaagaacgccctggagtcctacgccttcaacatgaagagcgccgtggaggatgaggggctcaagggcaagatcagcgaggcggacaagaagaaggtgctggacaagtgtcaagaggtcatctcgtggctggacgccaacaccttggccgagaaggacgagtttgagcacaagaggaaggagctggagcaggtgtgtaaccccatcatcagcggactgtaccagggtgccggtggtcccgggcctgggggcttcggggctcagggtcccaagggagggtctgggtcaggccccaccattgaggaggtagattaggggcctttccaagattgctgtttttgttttggagcttcaagactttgcatttcctagtatttctgtttgtcagttctcaatttcctgtgtttgcaatgttgaaattttttggtgaagtactgaacttgctttttttccggtttctacatgcagagatgaatttatactgccatcttacgactatttcttctttttaatacacttaactcaggccattttttaagttggttacttcaaagtaaataaactttaaaattcaaaaaaaaaaaaaaaaaa

SEQ ID NO: 98 - DNA, 3249 bp, Homo sapiens
  gene (1)..(3249): Accession No. NM_000201
caagcttagcctggccgggaaacgggaggcgtggaggccgggagcagcccccggggtcatcgccctgccaccgccgcccgattgctttagcttggaaattccggagctgaagcggccagcgagggaggatgaccctctcggcccgggcaccctgtcagtccggaaataactgcagcatttgttccggaggggaaggcgcgaggtttccgggaaagcagcaccgccccttggcccccaggtggctagcgctataaaggatcacgcgccccagtcgacgctgagctcctctgctactcagagttgcaacctcagcctcgctatggctcccagcagcccccggcccgcgctgcccgcactcctggtcctgctcggggctctgttcccaggacctggcaatgcccagacatctgtgtccccctcaaaagtcatcctgccccggggaggctccgtgctggtgacatgcagcacctcctgtgaccagcccaagttgttgggcatagagaccccgttgcctaaaaaggagttgctcctgcctgggaacaaccggaaggtgtatgaactgagcaatgtgcaagaagatagccaaccaatgtgctattcaaactgccctgatgggcagtcaacagctaaaaccttcctcaccgtgtactggactccagaacgggtggaactggcacccctcccctcttggcagccagtgggcaagaaccttaccctacgctgccaggtggagggtggggcaccccgggccaacctcaccgtggtgctgctccgtggggagaaggagctgaaacgggagccagctgtgggggagcccgctgaggtcacgaccacggtgctggtgaggagagatcaccatggagccaatttctcgtgccgcactgaactggacctgcggccccaagggctggagctgtttgagaacacctcggccccctaccagctccagacctttgtcctgccagcgactcccccacaacttgtcagcccccgggtcctagaggtggacacgcaggggaccgtggtctgttccctggacgggctgttcccagtctcggaggcccaggtccacctggcactgggggaccagaggttgaaccccacagtcacctatggcaacgactccttctcggccaaggcctcagtcagtgtgaccgcagaggacgagggcacccagcggctgacgtgtgcagtaatactggggaaccagagccaggagacactgcagacagtgaccatctacagctttccggcgcccaacgtgattctgacgaagccagaggtctcagaagggaccgaggtgacagtgaagtgtgaggcccaccctagagccaaggtgacgctgaatggggttccagcccagccactgggcccgagggcccagctcctgctgaaggccaccccagaggacaacgggcgcagcttctcctgctctgcaaccctggaggtggccggccagcttatacacaagaaccagacccgggagcttcgtgtcctgtatggcccccgactggacgagagggattgtccgggaaactggacgtggccagaaaattcccagcagactccaatgtgccaggcttgggggaacccattgcccgagctcaagtgtctaaaggatggcactttcccactgcccatcggggaatcagtgactgtcactcgagatcttgagggcacctacctctgtcgggccaggagcactcaaggggaggtcacccgcaaggtgaccgtgaatgtgctctccccccggtatgagattgtcatcatcactgtggtagcagccgcagtcataatgggcactgcaggcctcagcacgtacctctataaccgccagcggaagatcaagaaatacagactacaacaggcccaaaaagggacccccatgaaaccgaacacacaagccacgcctccctgaacctatcccgggacagggcctcttcctcggccttcccatattggtggcagtggtgccacactgaacagagtggaagacatatgccatgcagctacacctaccggccctgggacgccggaggacagggcattgtcctcagtcagatacaacagcatttggggccatggtacctgcacacctaaaacactaggccacgcatctgatctgtagtcacatgactaagccaagaggaaggagcaagactcaagacatgattgatggatgttaaagtctagcctgatgagaggggaagtggtgggggagacatagccccaccatgaggacatacaactgggaaatactgaaacttgctgcctattgggtatgctgaggccccacagacttacagaagaagtggccctccatagacatgtgtagcatcaaaacacaaaggcccacacttcctgacggatgccagcttgggcactgctgtctactgaccccaacccttgatgatatgtatttattcatttgttattttaccagctatttattgagtgtcttttatgtaggctaaatgaacataggtctctggcctcacggagctcccagtcctaatcacattcaaggtcaccaggtacagttgtacaggttgtacactgcaggagagtgcctggcaaaaagatcaaatggggctgggacttctcattggccaacctgcctttccccagaaggagtgatttttctatcggcacaaaagcactatatggactggtaatggttacaggttcagagattacccagtgaggccttattcctcccttccccccaaaactgacacctttgttagccacctccccacccacatacatttctgccagtgttcacaatgacactcagcggtcatgtctggacatgagtgcccagggaatatgcccaagctatgccttgtcctcttgtcctgtttgcatttcactgggagcttgcactatgcagctccagtttcctgcagtgatcagggtcctgcaagcagtggggaagggggccaaggtattggaggactccctcccagctttggaagcctcatccgcgtgtgtgtgtgtgtgtatgtgtagacaagctctcgctctgtcacccaggctggagtgcagtggtgcaatcatggttcactgcagtcttgaccttttgggctcaagtgatcctcccacctcagcctcctgagtagctgggaccataggctcacaacaccacacctggcaaatttgattttttttttttttccagagacggggtctcgcaacattgcccagacttcctttgtgttagttaataaagctttctcaactgccaaa

SEQ ID NO: 99 - DNA, 2750 bp, Homo sapiens
  gene (1)..(2750): Accession No. NM_005531
attgtttcctactccattttctctggggcaatagcagaataggagcaagccagcactagtcagctaactaagtgactcaaccaaggccttttttccttgttatctttgcagatacttcattttcttagcgtttctggagattacaacatcctgcggttccgtttctgggaactttactgatttatctcccccctcacacaaataagcattgattcctgcatttctgaagatctcaagatctggactactgttgaaaaaatttccagtgaggctcacttatgtctgtaaagatgggaaaaaaatacaagaacattgttctactaaaaggattagaggtcatcaatgattatcattttagaatggttaagtccttactgagcaacgatttaaaacttaatttaaaaatgagagaagagtatgacaaaattcagattgctgacttgatggaagaaaagttccgaggtgatgctggtttgggcaaactaataaaaattttcgaagatataccaacgcttgaagacctggctgaaactcttaaaaaagaaaagttaaaagtaaaaggaccagccctatcaagaaagaggaagaaggaagtggatgctacttcacctgcaccctccacaagcagcactgtcaaaactgaaggagcagaggcaactcctggagctcagaaaagaaaaaaatcaaccaaagaaaaggctggacccaaagggagtaaggtgtccgaggaacagactcagcctccctctcctgcaggagccggcatgtccacagccatgggccgttccccatctcccaagacctcattgtcagctccacccaacagttcttcaactgagaacccgaaaacagtggccaaatgtcaggtaactcccagaagaaatgttctccaaaaacgcccagtgatagtgaaggtactgagtacaacaaagccatttgaatatgagaccccagaaatggagaaaaaaataatgtttcatgctacagtggctacacagacacagttcttccatgtgaaggttttaaacaccagcttgaaggagaaattcaatggaaagaaaatcatcatcatatcagattatttggaatatgatagtctcctagaggtcaatgaagaatctactgtatctgaagctggtcctaaccaaacgtttgaggttccaaataaaatcatcaacagagcaaaggaaactctgaagattgatattcttcacaaacaagcttcaggaaatattgtatatggggtatttatgctacataagaaaacagtaaatcagaagaccacaatctacgaaattcaggatgatagaggaaaaatggatgtagtggggacaggacaatgtcacaatatcccctgtgaagaaggagataagctccaacttttctgctttcgacttagaaaaaagaaccagatgtcaaaactgatttcagaaatgcatagttttatccagataaagaaaaaaacaaacccgagaaacaatgaccccaagagcatgaagctaccccaggaacagcgtcagcttccatatccttcagaggccagcacaaccttccctgagagccatcttcggactcctcagatgccaccaacaactccatccagcagtttcttcaccaagaaaagtgaagacacaatctccaaaatgaatgacttcatgaggatgcagatactgaaggaagggagtcattttccaggaccgttcatgaccagcataggcccagctgagagccatccccacactcctcagatgcctccatcaacaccaagcagcagtttcttaaccacgttgaaaccaagactgaagactgaacctgaagaagtttccatagaagacagtgcccagagtgacctcaaagaagtgatggtgctgaacgcaacagaatcatttgtatatgagcccaaagagcagaagaaaatgtttcatgccacagtggcaactgagaatgaagtcttccgagtgaaggtttttaatattgacctaaaggagaagttcaccccaaagaagatcattgccatagcaaattatgtttgccgcaatgggttcctggaggtatatcctttcacacttgtggctgatgtgaatgctgaccgaaacatggagatcccaaaaggattgattagaagtgccagcgtaactcctaaaatcaatcagctttgctcacaaactaaaggaagttttgtgaatggggtgtttgaggtacataagaaaaatgtaaggggtgaattcacttattatgaaatacaagataatacagggaagatggaagtggtggtgcatggacgactgaccacaatcaactgtgaggaaggagataaactgaaactcacctgctttgaattggcaccgaaaagtgggaataccggggagttgagatctgtaattcatagtcacatcaaggtcatcaagaccaggaaaaacaagaaagacatactcaatcctgattcaagtatggaaacttcaccagactttttcttctaaaatctggatgtcattgacgataatgtttatggagataaggtctaagtgcctaaaaaaatgtacatatacctggttgaaatacaacactatacatacacaccaccatatatactagctgttaatcctatggaatggggtattgggagtgcttttttaatttttcatagtttttttttaataaaatggcatattttgcatctacaacttctataatttgaaaaaataaataaacattatcttttttgtgaaaggaaaaaaaaaaaaaaaaaa

SEQ ID NO: 100 - DNA, 1240 bp, Homo sapiens
  gene (1)..(1240): Accession No. NM_000619
cacattgttctgatcatctgaagatcagctattagaagagaaagatcagttaagtcctttggacctgatcagcttgatacaagaactactgatttcaacttctttggcttaattctctcggaaacgatgaaatatacaagttatatcttggcttttcagctctgcatcgttttgggttctcttggctgttactgccaggacccatatgtaaaagaagcagaaaaccttaagaaatattttaatgcaggtcattcagatgtagcggataatggaactcttttcttaggcattttgaagaattggaaagaggagagtgacagaaaaataatgcagagccaaattgtctccttttacttcaaactttttaaaaactttaaagatgaccagagcatccaaaagagtgtggagaccatcaaggaagacatgaatgtcaagtttttcaatagcaacaaaaagaaacgagatgacttcgaaaagctgactaattattcggtaactgacttgaatgtccaacgcaaagcaatacatgaactcatccaagtgatggctgaactgtcgccagcagctaaaacagggaagcgaaaaaggagtcagatgctgtttcgaggtcgaagagcatcccagtaatggttgtcctgcctgcaatatttgaattttaaatctaaatctatttattaatatttaacattatttatatggggaatatatttttagactcatcaatcaaataagtatttataatagcaacttttgtgtaatgaaaatgaatatctattaatatatgtattatttataattcctatatcctgtgactgtctcacttaatcctttgttttctgactaattaggcaaggctatgtgattacaaggctttatctcaggggccaactaggcagccaacctaagcaagatcccatgggttgtgtgtttatttcacttgatgatacaatgaacacttataagtgaagtgatactatccagttactgccggtttgaaaatatgcctgcaatctgagccagtgctttaatggcatgtcagacagaacttgaatgtgtcaggtgaccctgatgaaaacatagcatctcaggagatttcatgcctggtgcttccaaatattgttgacaactgtgactgtacccaaatggaaagtaactcatttgttaaaattatcaatatctaatatatatgaataaagtgtaagttcacaacaaaaaaaaaaaaaaaaaaaaaaaaaaaaaa

SEQ ID NO: 101 - DNA, 1629 bp, Homo sapiens
  gene (1)..(1629): Accession No. NM_000572
acacatcaggggcttgctcttgcaaaaccaaaccacaagacagacttgcaaaagaaggcatgcacagctcagcactgctctgttgcctggtcctcctgactggggtgagggccagcccaggccagggcacccagtctgagaacagctgcacccacttcccaggcaacctgcctaacatgcttcgagatctccgagatgccttcagcagagtgaagactttctttcaaatgaaggatcagctggacaacttgttgttaaaggagtccttgctggaggactttaagggttacctgggttgccaagccttgtctgagatgatccagttttacctggaggaggtgatgccccaagctgagaaccaagacccagacatcaaggcgcatgtgaactccctgggggagaacctgaagaccctcaggctgaggctacggcgctgtcatcgatttcttccctgtgaaaacaagagcaaggccgtggagcaggtgaagaatgcctttaataagctccaagagaaaggcatctacaaagccatgagtgagtttgacatcttcatcaactacatagaagcctacatgacaatgaagatacgaaactgagacatcagggtggcgactctatagactctaggacataaattagaggtctccaaaatcggatctggggctctgggatagctgacccagccccttgagaaaccttattgtacctctcttatagaatatttattacctctgatacctcaacccccatttctatttatttactgagcttctctgtgaacgatttagaaagaagcccaatattataatttttttcaatatttattattttcacctgtttttaagctgtttccatagggtgacacactatggtatttgagtgttttaagataaattataagttacataagggaggaaaaaaaatgttctttggggagccaacagaagcttccattccaagcctgaccacgctttctagctgttgagctgttttccctgacctccctctaatttatcttgtctctgggcttggggcttcctaactgctacaaatactcttaggaagagaaaccagggagcccctttgatgattaattcaccttccagtgtctcggagggattcccctaacctcattccccaaccacttcattcttgaaagctgtggccagcttgttatttataacaacctaaatttggttctaggccgggcgcggtggctcacgcctgtaatcccagcactttgggaggctgaggcgggtggatcacttgaggtcaggagttcctaaccagcctggtcaacatggtgaaaccccgtctctactaaaaatacaaaaattagccgggcatggtggcgcgcacctgtaatcccagctacttgggaggctgaggcaagagaattgcttgaacccaggagatggaagttgcagtgagctgatatcatgcccctgtactccagcctgggtgacagagcaagactctgtctcaaaaaataaaaataaaaataaatttggttctaatagaactcagttttaactagaatttattcaattcctctgggaatgttacattgtttgtctgtcttcatagcagattttaattttgaataaataaatgtatcttattcacatc

SEQ ID NO: 102 - DNA, 2347 bp, Homo sapiens
  gene (1)..(2347): Accession No. NM_002187
ctgtttcagggccattggactctccgtcctgcccagagcaagatgtgtcaccagcagttggtcatctcttggttttccctggtttttctggcatctcccctcgtggccatatgggaactgaagaaagatgtttatgtcgtagaattggattggtatccggatgcccctggagaaatggtggtcctcacctgtgacacccctgaagaagatggtatcacctggaccttggaccagagcagtgaggtcttaggctctggcaaaaccctgaccatccaagtcaaagagtttggagatgctggccagtacacctgtcacaaaggaggcgaggttctaagccattcgctcctgctgcttcacaaaaaggaagatggaatttggtccactgatattttaaaggaccagaaagaacccaaaaataagacctttctaagatgcgaggccaagaattattctggacgtttcacctgctggtggctgacgacaatcagtactgatttgacattcagtgtcaaaagcagcagaggctcttctgacccccaaggggtgacgtgcggagctgctacactctctgcagagagagtcagaggggacaacaaggagtatgagtactcagtggagtgccaggaggacagtgcctgcccagctgctgaggagagtctgcccattgaggtcatggtggatgccgttcacaagctcaagtatgaaaactacaccagcagcttcttcatcagggacatcatcaaacctgacccacccaagaacttgcagctgaagccattaaagaattctcggcaggtggaggtcagctgggagtaccctgacacctggagtactccacattcctacttctccctgacattctgcgttcaggtccagggcaagagcaagagagaaaagaaagatagagtcttcacggacaagacctcagccacggtcatctgccgcaaaaatgccagcattagcgtgcgggcccaggaccgctactatagctcatcttggagcgaatgggcatctgtgccctgcagttaggttctgatccaggatgaaaatttggaggaaaagtggaagatattaagcaaaatgtttaaagacacaacggaatagacccaaaaagataatttctatctgatttgctttaaaacgtttttttaggatcacaatgatatctttgctgtatttgtatagttagatgctaaatgctcattgaaacaatcagctaatttatgtatagattttccagctctcaagttgccatgggccttcatgctatttaaatatttaagtaatttatgtatttattagtatattactgttatttaacgtttgtctgccaggatgtatggaatgtttcatactcttatgacctgatccatcaggatcagtccctattatgcaaaatgtgaatttaattttatttgtactgacaacttttcaagcaaggctgcaagtacatcagttttatgacaatcaggaagaatgcagtgttctgataccagtgccatcatacacttgtgatggatgggaacgcaagagatacttacatggaaacctgacaatgcaaacctgttgagaagatccaggagaacaagatgctagttcccatgtctgtgaagacttcctggagatggtgttgataaagcaatttagggccacttacacttctaagcaagtttaatctttggatgcctgaattttaaaagggctagaaaaaaatgattgaccagcctgggaaacataacaagaccccgtctctacaaaaaaaatttaaaattagccaggcgtggtggctcatgcttgtggtcccagctgttcaggaggatgaggcaggaggatctcttgagcccaggaggtcaaggctatggtgagccgtgattgtgccactgcataccagcctaggtgacagaatgagaccctgtctcaaaaaaaaaaatgattgaaattaaaattcagctttagcttccatggcagtcctcacccccacctctctaaaagacacaggaggatgacacagaaacaccgtaagtgtctggaaggcaaaaagatcttaagattcaagagagaggacaagtagttatggctaaggacatgaaattgtcagaatggcaggtggcttcttaacagccctgtgagaagcagacagatgcaaagaaaatctggaatccctttctcattagcatgaatgaacctgatacacaattatgaccagaaaatatggctccatgaaggtgctacttttaagtaatgtatgtgcgctctgtaaagtgattacatttgtttcctgtttgtttatttatttatttatttttgcattctgaggctgaactaataaaaactcttctttgtaatc

SEQ ID NO: 103 - DNA, 1486 bp, Homo sapiens
  gene (1)..(1486): Accession No. NM_000585
gactccgggtggcaggcgcccgggggaatcccagctgactcgctcactgccttcgaagtccggcgccccccgggagggaactgggtggccgcaccctcccggctgcggtggctgtcgccccccaccctgcagccaggactcgatggagaatccattccaatatatggccatgtggctctttggagcaatgttccatcatgttccatgctgctgacgtcacatggagcacagaaatcaatgttagcagatagccagcccatacaagatcgtattgtattgtaggaggcattgtggatggatggctgctggaaaccccttgccatagccagctcttcttcaatacttaaggatttaccgtggctttgagtaatgagaatttcgaaaccacatttgagaagtatttccatccagtgctacttgtgtttacttctaaacagtcattttctaactgaagctggcattcatgtcttcattttgggctgtttcagtgcagggcttcctaaaacagaagccaactgggtgaatgtaataagtgatttgaaaaaaattgaagatcttattcaatctatgcatattgatgctactttatatacggaaagtgatgttcaccccagttgcaaagtaacagcaatgaagtgctttctcttggagttacaagttatttcacttgagtccggagatgcaagtattcatgatacagtagaaaatctgatcatcctagcaaacaacagtttgtcttctaatgggaatgtaacagaatctggatgcaaagaatgtgaggaactggaggaaaaaaatattaaagaatttttgcagagttttgtacatattgtccaaatgttcatcaacacttcttgattgcaattgattctttttaaagtgtttctgttattaacaaacatcactctgctgcttagacataacaaaacactcggcatttcaaatgtgctgtcaaaacaagtttttctgtcaagaagatgatcagaccttggatcagatgaactcttagaaatgaaggcagaaaaatgtcattgagtaatatagtgactatgaacttctctcagacttactttactcatttttttaatttattattgaaattgtacatatttgtggaataatgtaaaatgttgaataaaaatatgtacaagtgttgttttttaagttgcactgatattttacctcttattgcaaaatagcatttgtttaagggtgatagtcaaattatgtattggtggggctgggtaccaatgctgcaggtcaacagctatgctggtaggctcctgccagtgtggaaccactgactactggctctcattgacttccttactaagcatagcaaacagaggaagaatttgttatcagtaagaaaaagaagaactatatgtgaatcctcttctttatactgtaatttagttattgatgtataaagcaactgttatgaaataaagaaattgcaataactggcaaaaaaaaaaaaaaaaaa

SEQ ID NO: 104 - DNA, 1145 bp, Homo sapiens
  gene (1)..(1145): Accession No. NM_001562
attctctccccagcttgctgagccctttgctcccctggcgactgcctggacagtcagcaaggaattgtctcccagtgcattttgccctcctggctgccaactctggctgctaaagcggctgccacctgctgcagtctacacagcttcgggaagaggaaaggaacctcagaccttccagatcgcttcctctcgcaacaaactatttgtcgcaggaataaagatggctgctgaaccagtagaagacaattgcatcaactttgtggcaatgaaatttattgacaatacgctttactttatagctgaagatgatgaaaacctggaatcagattactttggcaagcttgaatctaaattatcagtcataagaaatttgaatgaccaagttctcttcattgaccaaggaaatcggcctctatttgaagatatgactgattctgactgtagagataatgcaccccggaccatatttattataagtatgtataaagatagccagcctagaggtatggctgtaactatctctgtgaagtgtgagaaaatttcaactctctcctgtgagaacaaaattatttcctttaaggaaatgaatcctcctgataacatcaaggatacaaaaagtgacatcatattctttcagagaagtgtcccaggacatgataataagatgcaatttgaatcttcatcatacgaaggatactttctagcttgtgaaaaagagagagacctttttaaactcattttgaaaaaagaggatgaattgggggatagatctataatgttcactgttcaaaacgaagactagctattaaaatttcatgccgggcgcagtggctcacgcctgtaatcccagccctttgggaggctgaggcgggcagatcaccagaggtcaggtgttcaagaccagcctgaccaacatggtgaaacctcatctctactaaaaatacaaaaaattagctgagtgtagtgacgcatgccctcaatcccagctactcaagaggctgaggcaggagaatcacttgcactccggaggtagaggttgtggtgagccgagattgcaccattgcgctctagcctgggcaacaacagcaaaactccatctcaaaaaataaaataaataaataaacaaataaaaaattcataatgtg

SEQ ID NO: 105 - DNA, 3630 bp, Homo sapiens
  gene (1)..(3630): Accession No. NM_005699
gccagaggggctaggatgagagacagagggtgtgatggtgggtgctgggagatgtagccgaccttggggctggtggctgggggagtgggtagcctgggaaaggccaggatgtggacggactggtatggcattgagcctgaagtggtccaacttggggttccccagtgcctaggaaagttgtccccttgaatgtcagtgtgaaggtgaaggaggaagcagatgcctgttcatatggaaacaaagacctggctgtgaagaggggaggcggacaccaaagtcctgacacttgggcgggacagaattgatctgtgagagactcatctagttcataccctaggtgaccctgggggtggcatgggggtagattagagatcccagtctggtatcctctggagagtaggagtcccaggagctgaaggtttctggccactgaactttggctaaagcagaggtgtcacagctgctcaagattccctggttaaaaagtgaaagtgaaatagagggtcggggcagtgctttcccagaaggattgctcggcatcctgcccttcccagaagcagctctggtgctgaagagagcactgcctccctgtgtgactgggtgagtccatattctctctttgggtctcaattttgccttccctaatgaaggggtaagattggactaggtaagcatcttacaaccatttgtggtcatgagagctggggtggggaaggattgtcacttgacccccccagctctgtttctaagtgctgaaagagctccaggctatgctacgggaggagaagccagctactgaggaaaagccagctactgagaaaaagcgggagtggtttaccattctcctcccccacctttcaccagagaagaggacgttgtcacagataaagagccaggctcaccagctcctgacgcatgcatcatgaccatgagacacaactggacaccagacctcagccctttgtgggtcctgctcctgtgtgcccacgtcgtcactctcctggtcagagccacacctgtctcgcagaccaccacagctgccactgcctcagttagaagcacaaaggacccctgcccctcccagcccccagtgttcccagcagctaagcagtgtccagcattggaagtgacctggccagaggtggaagtgccactgaatggaacgctgagcttatcctgtgtggcctgcagccgcttccccaacttcagcatcctctactggctgggcaatggttccttcattgagcacctcccaggccgactgtgggaggggagcaccagccgggaacgtgggagcacaggtacgcagctgtgcaaggccttggtgctggagcagctgacccctgccctgcacagcaccaacttctcctgtgtgctcgtggaccctgaacaggttgtccagcgtcacgtcgtcctggcccagctctgggtgaggagcccaaggagaggcctccaggaacaggaggagctctgcttccatatgtggggaggaaagggtgggctctgccagagcagcctgtgaactaatgcccagcattcctcaaggtcagccagacaaaaaggaacttaggtcttgggcagaggaggtgtagcctggggcaaagtgatgagatgtccctcctttccttggcctgatccttgtctgccttcacttccctaggctgggctgagggcaaccttgccccccacccaagaagccctgccctccagccacagcagtccacagcagcagggttaagactcagcacagggccagcagcagcacaaccttgaccagagcttgggtcctacctgtctacctggagtgaacagtccctgactgcctgtaggctgcgtggatgcgcaacacaccccctccttctctgctttgggtcccttctctcaccaaattcaaactccattcccacctacctagaaaatcacagcctccttataatgcctcctcctcctgccattctctctccacctatccattagccttcctaacgtcctactcctcacactgctctactgctcagaaaccaccaagactgttgatgccttagccttgcactccagggccctacctgcatttcccacatgactttctggaagcctcccaactattcttgcttttcccagacagctcccactcccatgtctctgctcatttagtcccgtcttcctcaccgccccagcaggggaacgctcaagcctggttgaaatgctgcctcttcagtgaagtcatcctctttcagctctggccgcattctgcagacttcctatcttcgtgctgtatgttttttttttcccccttcactctaatggactgttccagggaagggatgggggcagcagctgcttcggatccacactgtatctgtgtcatccccacatgggtcctcataaaggattattcaatggaggcatcctgacatctgttcatttaggcttcagttccactcccaggaactttgcctgtcccacgagggagtatgggagagagggactgccacacagaagctgaagacaacacctgcttcaggggaacacaggcgcttgaaaaagaaaagagagaacagcccataatgctccccgggagcagaggccactaatggagagtgggaagagcctggaaagatgtggcctcaggaaaagggatgagagaaaggaggtggtatggaagactcagcaggaacaaggtaggcttcaaagagcctatattcctctttttcccacaccgatcaagtcaactcagtactcacgggagaaaaatagactttatttacaagtaataacatttagaaaagatccatccccggcccttaaaaaccttcccatcactccaaatcccaccccagtgcaagtctggggaaggtagggtgtgagctgctgctgaaggctgtcccccaaccccactcctgagacacagggcccatccgtcctgggaaagagcatcctctggcaggtgctcccaccaggtcagacccagtcctggacttcaagagtgagggcccctgctgggcccagccaccaggacagcaggaaccagggcctactcctcttatggtcccttctagatccagaggctaagaggaagactggccaggcccaaggacccagccatcaaaaccagcctcaaatctggttgtgatggagaagtgactttgctttaagaaaaaaggaggcaaggtagggagagcgcccacactgtccatgctccaggccccctgggccagctccgagaaggcgccagtgaaggaccagggaccaggccagggtgcgggcaggcatcactgtctctaggggtttggctactgttggcctgggagctgagagaaggcactgagagggacagtaggcggaggaccaggtgacggcagcatcggggacacaggtggggccactcactggtactggccctttagtgctttgcctgaaagagacacagtcacatggccagatgagaacttgcgatactagcctgcacccactggctgggaagatctcttcctgctcccacgcccctgtctggatcccctcccttgtgagccccagggttatcagttgctggctgtgcctgagcagctctgggtgctctccatgagaatggggccatctgtcttctctccttggagaggagctaccagg

SEQ ID NO: 106 - DNA, 1498 bp, Homo sapiens
  gene (1)..(1498): Accession No. NM_000576
accaaacctcttcgaggcacaaggcacaacaggctgctctgggattctcttcagccaatcttcattgctcaagtgtctgaagcagccatggcagaagtacctgagctcgccagtgaaatgatggcttattacagtggcaatgaggatgacttgttctttgaagctgatggccctaaacagatgaagtgctccttccaggacctggacctctgccctctggatggcggcatccagctacgaatctccgaccaccactacagcaagggcttcaggcaggccgcgtcagttgttgtggccatggacaagctgaggaagatgctggttccctgcccacagaccttccaggagaatgacctgagcaccttctttcccttcatctttgaagaagaacctatcttcttcgacacatgggataacgaggcttatgtgcacgatgcacctgtacgatcactgaactgcacgctccgggactcacagcaaaaaagcttggtgatgtctggtccatatgaactgaaagctctccacctccagggacaggatatggagcaacaagtggtgttctccatgtcctttgtacaaggagaagaaagtaatgacaaaatacctgtggccttgggcctcaaggaaaagaatctgtacctgtcctgcgtgttgaaagatgataagcccactctacagctggagagtgtagatcccaaaaattacccaaagaagaagatggaaaagcgatttgtcttcaacaagatagaaatcaataacaagctggaatttgagtctgcccagttccccaactggtacatcagcacctctcaagcagaaaacatgcccgtcttcctgggagggaccaaaggcggccaggatataactgacttcaccatgcaatttgtgtcttcctaaagagagctgtacccagagagtcctgtgctgaatgtggactcaatccctagggctggcagaaagggaacagaaaggtttttgagtacggctatagcctggactttcctgttgtctacaccaatgcccaactgcctgccttagggtagtgctaagaggatctcctgtccatcagccaggacagtcagctctctcctttcagggccaatccccagcccttttgttgagccaggcctctctcacctctcctactcacttaaagcccgcctgacagaaaccacggccacatttggttctaagaaaccctctgtcattcgctcccacattctgatgagcaaccgcttccctatttatttatttatttgtttgtttgttttattcattggtctaatttattcaaagggggcaagaagtagcagtgtctgtaaaagagcctagtttttaatagctatggaatcaattcaatttggactggtgtgctctctttaaatcaagtcctttaattaagactgaaaatatataagctcagattatttaaatgggaatatttataaatgagcaaatatcatactgttcaatggttctgaaataaacttcactgaag

SEQ ID NO: 107 - DNA, 4909 bp, Homo sapiens
  gene (1)..(4909): Accession No. NM_000877
tagacgcaccctctgaagatggtgactccctcctgagaagctggaccccttggtaaaagacaaggccttctccaagaagaatatgaaagtgttactcagacttatttgtttcatagctctactgatttcttctctggaggctgataaatgcaaggaacgtgaagaaaaaataattttagtgtcatctgcaaatgaaattgatgttcgtccctgtcctcttaacccaaatgaacacaaaggcactataacttggtataaagatgacagcaagacacctgtatctacagaacaagcctccaggattcatcaacacaaagagaaactttggtttgttcctgctaaggtggaggattcaggacattactattgcgtggtaagaaattcatcttactgcctcagaattaaaataagtgcaaaatttgtggagaatgagcctaacttatgttataatgcacaagccatatttaagcagaaactacccgttgcaggagacggaggacttgtgtgcccttatatggagttttttaaaaatgaaaataatgagttacctaaattacagtggtataaggattgcaaacctctacttcttgacaatatacactttagtggagtcaaagataggctcatcgtgatgaatgtggctgaaaagcatagagggaactatacttgtcatgcatcctacacatacttgggcaagcaatatcctattacccgggtaatagaatttattactctagaggaaaacaaacccacaaggcctgtgattgtgagcccagctaatgagacaatggaagtagacttgggatcccagatacaattgatctgtaatgtcaccggccagttgagtgacattgcttactggaagtggaatgggtcagtaattgatgaagatgacccagtgctaggggaagactattacagtgtggaaaatcctgcaaacaaaagaaggagtaccctcatcacagtgcttaatatatcggaaattgaaagtagattttataaacatccatttacctgttttgccaagaatacacatggtatagatgcagcatatatccagttaatatatccagtcactaatttccagaagcacatgattggtatatgtgtcacgttgacagtcataattgtgtgttctgttttcatctataaaatcttcaagattgacattgtgctttggtacagggattcctgctatgattttctcccaataaaagcttcagatggaaagacctatgacgcatatatactgtatccaaagactgttggggaagggtctacctctgactgtgatatttttgtgtttaaagtcttgcctgaggtcttggaaaaacagtgtggatataagctgttcatttatggaagggatgactacgttggggaagacattgttgaggtcattaatgaaaacgtaaagaaaagcagaagactgattatcattttagtcagagaaacatcaggcttcagctggctgggtggttcatctgaagagcaaatagccatgtataatgctcttgttcaggatggaattaaagttgtcctgcttgagctggagaaaatccaagactatgagaaaatgccagaatcgattaaattcattaagcagaaacatggggctatccgctggtcaggggactttacacagggaccacagtctgcaaagacaaggttctggaagaatgtcaggtaccacatgccagtccagcgacggtcaccttcatctaaacaccagttactgtcaccagccactaaggagaaactgcaaagagaggctcacgtgcctctcgggtagcatggagaagttgccaagagttctttaggtgcctcctgtcttatggcgttgcaggccaggttatgcctcatgctgacttgcagagttcatggaatgtaactatatcatcctttatccctgaggtcacctggaatcagattattaagggaataagccatgacgtcaatagcagcccagggcacttcagagtagagggcttgggaagatcttttaaaaaggcagtaggcccggtgtggtggctcacgcctataatcccagcactttgggaggctgaagtgggtggatcaccagaggtcaggagttcgagaccagcccagccaacatggcaaaaccccatctctactaaaaatacaaaaatgagctaggcatggtggcacacgcctgtaatcccagctacacctgaggctgaggcaggagaattgcttgaaccggggagacggaggttgcagtgagccgagtttgggccactgcactctagcctggcaacagagcaagactccgtctcaaaaaaagggcaataaatgccctctctgaatgtttgaactgccaagaaaaggcatggagacagcgaactagaagaaagggcaagaaggaaatagccaccgtctacagatggcttagttaagtcatccacagcccaagggcggggctatgccttgtctggggaccctgtagagtcactgaccctggagcggctctcctgagaggtgctgcaggcaaagtgagactgacacctcactgaggaagggagacatattcttggagaactttccatctgcttgtattttccatacacatccccagccagaagttagtgtccgaagaccgaattttattttacagagcttgaaaactcacttcaatgaacaaagggattctccaggattccaaagttttgaagtcatcttagctttccacaggagggagagaacttaaaaaagcaacagtagcagggaattgatccacttcttaatgctttcctccctggcatgaccatcctgtcctttgttattatcctgcattttacgtctttggaggaacagctccctagtggcttcctccgtctgcaatgtcccttgcacagcccacacatgaaccatccttcccatgatgccgctcttctgtcatcccgctcctgctgaaacacctcccaggggctccacctgttcaggagctgaagcccatgctttcccaccagcatgtcactcccagaccacctccctgccctgtcctccagcttcccctcgctgtcctgctgtgtgaattcccaggttggcctggtggccatgtcgcctgcccccagcactcctctgtctctgctcttgcctcgacccttcctcctcctttgcctaggaggccttctcgcattttctctagctgatcagaattttaccaaaattcagaacatcctccaattccacagtctctgggagactttccctaagaggcgacttcctctccagccttctctctctggtcaggcccactgcagagatggtggtgagcacatctgggaggctggtctccctccagctggaattgctgctctctgagggagaggctgtggtggctgtctctgtccctcactgccttccaggagcaatttgcacatgtaacatagatttatgtaatgctttatgtttaaaaacattccccaattatcttatttaatttttgcaattattctaattttatatatagagaaagtgacctattttttaaaaaaatcacactctaagttctattgaacctaggacttgagcctccatttctggcttctagtctggtgttctgagtacttgatttcaggtcaataacggtcccccctcactccacactggcacgtttgtgagaagaaatgacattttgctaggaagtgaccgagtctaggaatgcttttattcaagacaccaaattccaaacttctaaatgttggaattttcaaaaattgtgtttagattttatgaaaaactcttctactttcatctattctttccctagaggcaaacatttcttaaaatgtttcattttcattaaaaatgaaagccaaatttatatgccaccgattgcaggacacaagcacagttttaagagttgtatgaacatggagaggacttttggtttttatatttctcgtatttaatatgggtgaacaccaacttttatttggaataataattttcctcctaaacaaaaacacattgagtttaagtctctgactcttgcctttccacctgctttctcctgggcccgctttgcctgcttgaaggaacagtgctgttctggagctgctgttccaacagacagggcctagctttcatttgacacacagactacagccagaagcccatggagcagggatgtcacgtcttgaaaagcctattagatgttttacaaatttaattttgcagattattttagtctgtcatccagaaaatgtgtcagcatgcatagtgctaagaaagcaagccaatttggaaacttaggttagtgacaaaattggccagagagtgggggtgatgatgaccaagaattacaagtagaatggcagctggaatttaaggagggacaagaatcaatggataagcgtgggtggaggaagatccaaacagaaaagtgcaaagttattccccatcttccaagggttgaattctggaggaagaagacacattcctagttccccgtgaacttcctttgacttattgtccccactaaaacaaaacaaaaaacttttaatgccttccacattaattagattttcttgcagtttttttatggcatttttttaaagatgccctaagtgttgaagaagagtttgcaaatgcaacaaaatatttaattaccggttgttaaaactggtttagcacaatttatattttccctctcttgcctttcttatttgcaataaaaggtattgagccattttttaaatgacatttttgataaattatgtttgtactagttgatgaaggagttttttttaacctgtttatataattttgcagcagaagccaaattttttgtatattaaagcaccaaattcatgtacagcatgcatcacggatcaatagactgtacttattttccaataaaattttcaaactttgtactgttaaa

SEQ ID NO: 108 - DNA, 1973 bp, Homo sapiens
  gene (1)..(1973): Accession No. NM_173843
gggcagctccaccctgggagggactgtggcccaggtactgcccgggtgctactttatgggcagcagctcagttgagttagagtctggaagacctcagaagacctcctgtcctatgaggccctccccatggctttagggggattataaaactaatcatcaaagccaagaaggcaagagcaagcatgtaccgctgaaaacacaagataactgcataagtaatgactttcagtgcagattcatagctaacccataaactgctggggcaaaaatcatcttggaaggctctgaacctcagaaaggattcacaagacgatctgccgaccctctgggagaaaatccagcaagatgcaagccttcagaatctgggatgttaaccagaagaccttctatctgaggaacaaccaactagttgctggatacttgcaaggaccaaatgtcaatttagaagaaaagatagatgtggtacccattgagcctcatgctctgttcttgggaatccatggagggaagatgtgcctgtcctgtgtcaagtctggtgatgagaccagactccagctggaggcagttaacatcactgacctgagcgagaacagaaagcaggacaagcgcttcgccttcatccgctcagacagcggccccaccaccagttttgagtctgccgcctgccccggttggttcctctgcacagcgatggaagctgaccagcccgtcagcctcaccaatatgcctgacgaaggcgtcatggtcaccaaattctacttccaggaggacgagtagtactgcccaggcctgcctgttcccattcttgcatggcaaggactgcagggactgccagtccccctgccccagggctcccggctatgggggcactgaggaccagccattgaggggtggaccctcagaaggcgtcacaagaacctggtcacaggactctgcctcctcttcaactgaccagcctccatgctgcctccagaatggtctttctaatgtgtgaatcagagcacagcagcccctgcacaaagcccttccatgtcgcctctgcattcaggatcaaaccccgaccacctgcccaacctgctctcctcttgccactgcctcttcctccctcattccaccttcccatgccctggatccatcaggccacttgatgacccccaaccaagtggctcccacaccctgttttacaaaaaagaaaagaccagtccatgagggaggtttttaagggtttgtggaaaatgaaaattaggatttcatgatttttttttttcagtccccgtgaaggagagcccttcatttggagattatgttctttcggggagaggctgaggacttaaaatattcctgcatttgtgaaatgatggtgaaagtaagtggtagcttttcccttctttttcttctttttttgtgatgtcccaacttgtaaaaattaaaagttatggtactatgttagccccataattttttttttccttttaaaacacttccataatctggactcctctgtccaggcactgctgcccagcctccaagctccatctccactccagattttttacagctgcctgcagtactttacctcctatcagaagtttctcagctcccaaggctctgagcaaatgtggctcctgggggttctttcttcctctgctgaaggaataaattgctccttgacattgtagagcttctggcacttggagacttgtatgaaagatggctgtgcctctgcctgtctcccccaccgggctgggagctctgcagagcaggaaacatgactcgtatatgtctcaggtccctgcagggccaagcacctagcctcgctcttggcaggtactcagcgaatgaatgctgtatatgttgggtgcaaagttccctacttcctgtgacttcagctctgttttacaataaaatcttgaaaatgcctaaaaaaaaaaaaaaaaaaaaaaaaaaaaaaaaaaaaaaaaaaaaaaaaaaaa

SEQ ID NO: 109 - DNA, 1049 bp, Homo sapiens
  gene (1)..(1049): Accession No. NM_016584
aaaacaacaggaagcagcttacaaactcggtgaacaactgagggaaccaaaccagagacgcgctgaacagagagaatcaggctcaaagcaagtggaagtgggcagagattccaccaggactggtgcaaggcgcagagccagccagatttgagaagaaggcaaaaagatgctggggagcagagctgtaatgctgctgttgctgctgccctggacagctcagggcagagctgtgcctgggggcagcagccctgcctggactcagtgccagcagctttcacagaagctctgcacactggcctggagtgcacatccactagtgggacacatggatctaagagaagagggagatgaagagactacaaatgatgttccccatatccagtgtggagatggctgtgacccccaaggactcagggacaacagtcagttctgcttgcaaaggatccaccagggtctgattttttatgagaagctgctaggatcggatattttcacaggggagccttctctgctccctgatagccctgtgggccagcttcatgcctccctactgggcctcagccaactcctgcagcctgagggtcaccactgggagactcagcagattccaagcctcagtcccagccagccatggcagcgtctccttctccgcttcaaaatccttcgcagcctccaggcctttgtggctgtagccgcccgggtctttgcccatggagcagcaaccctgagtccctaaaggcagcagctcaaggatggcactcagatctccatggcccagcaaggccaagataaatctaccaccccaggcacctgtgagccaacaggttaattagtccattaattttagtgggacctgcatatgttgaaaattaccaatactgactgacatgtgatgctgacctatgataaggttgagtatttattagatgggaagggaaatttggggattatttatcctcctggggacagtttggggaggattatttattgtatttatattgaattatgtacttttttcaataaagtcttatttttgtggctaaaaaaaa

SEQ ID NO: 110 - DNA, 1157 bp, Homo sapiens
  gene (1)..(1157): Accession No. NM_001012631
ccccagccagctgtcccgagtctggactttccctctgcccctccccactctcaggctggtggggtggggaaagcagcccattcctgggctcagagactcccaccccagctcagagggagcaggggcccagccagggacggaccctcattcctcccagggaccccagacctctgtctctctcggctgagtatttgtgccaggaagactgcgtgcagaaggtgactgtctcagtggagctgggtcatctcaggccttggctccttgaacttttggccgccatgtgcttcccgaaggtcctctctgatgacatgaagaagctgaaggcccgaatgcaccaggccatagaaagattttatgataaaatgcaaaatgcagaatcaggacgtggacaggtgatgtcgagcctggcagagctggaggacgacttcaaagagggctacctggagacagtggcggcttattatgaggagcagcacccagagctcactcctctacttgaaaaagaaagagatggattacggtgccgaggcaacagatcccctgtcccggatgttgaggatcccgcaaccgaggagcctggggagagcttttgtgacaaggtcatgagatggttccaggccatgctgcagcggctgcagacctggtggcacggggttctggcctgggtgaaggagaaggtggtggccctggtccatgcagtgcaggccctctggaaacagttccagagtttctgctgctctctgtcagagctcttcatgtcctctttccagtcctacggagccccacggggggacaaggaggagctgacaccccagaagtgctctgaaccccaatcctcaaaatgaagatactgacaccacctttgccctccccgtcaccgcgcacccaccctgacccctccctcagctgtcctgtgccccgccctctcccgcacactcagtccccctgcctggcgttcctgccgcagctctgacctggtgctgtcgccctggcatcttaataaaacctgcttatacttccctggcaggggagataccatgatcgcggaggtgggtttcccagggcaaggctgatctgttgccgtattagtccgttttcacacagctataaagaatgcctgagactgggtgatgtataaagaaaagaagtttaactga

SEQ ID NO: 111 - DNA, 816 bp, Homo sapiens
  gene (1)..(816): Accession No. NM_000879
atgcactttctttgccaaaggcaaacgcagaacgtttcagagccatgaggatgcttctgcatttgagtttgctagctcttggagctgcctacgtgtatgccatccccacagaaattcccacaagtgcattggtgaaagagaccttggcactgctttctactcatcgaactctgctgatagccaatgagactctgaggattcctgttcctgtacataaaaatcaccaactgtgcactgaagaaatctttcagggaataggcacactggagagtcaaactgtgcaagggggtactgtggaaagactattcaaaaacttgtccttaataaagaaatacattgacggccaaaaaaaaaagtgtggagaagaaagacggagagtaaaccaattcctagactacctgcaagagtttcttggtgtaatgaacaccgagtggataatagaaagttgagactaaactggtttgttgcagccaaagattttggaggagaaggacattttactgcagtgagaatgagggccaagaaagagtcaggccttaattttcagtataatttaacttcagagggaaagtaaatatttcaggcatactgacactttgccagaaagcataaaattcttaaaatatatttcagatatcagaatcattgaagtattttcctccaggcaaaattgatatacttttttcttatttaacttaacattctgtaaaatgtctgttaacttaatagtatttatgaaatggttaagaatttggtaaattagtatttatttaatgttatgttgtgttctaataaaacaaaaatagacaactgttc

SEQ ID NO: 112 - DNA, 1201 bp, Homo sapiens
  gene (1)..(1201): Accession No. NM_000600
aatattagagtctcaacccccaataaatataggactggagatgtctgaggctcattctgccctcgagcccaccgggaacgaaagagaagctctatctcccctccaggagcccagctatgaactccttctccacaagcgccttcggtccagttgccttctccctggggctgctcctggtgttgcctgctgccttccctgccccagtacccccaggagaagattccaaagatgtagccgccccacacagacagccactcacctcttcagaacgaattgacaaacaaattcggtacatcctcgacggcatctcagccctgagaaaggagacatgtaacaagagtaacatgtgtgaaagcagcaaagaggcactggcagaaaacaacctgaaccttccaaagatggctgaaaaagatggatgcttccaatctggattcaatgaggagacttgcctggtgaaaatcatcactggtcttttggagtttgaggtatacctagagtacctccagaacagatttgagagtagtgaggaacaagccagagctgtgcagatgagtacaaaagtcctgatccagttcctgcagaaaaaggcaaagaatctagatgcaataaccacccctgacccaaccacaaatgccagcctgctgacgaagctgcaggcacagaaccagtggctgcaggacatgacaactcatctcattctgcgcagctttaaggagttcctgcagtccagcctgagggctcttcggcaaatgtagcatgggcacctcagattgttgttgttaatgggcattccttcttctggtcagaaacctgtccactgggcacagaacttatgttgttctctatggagaactaaaagtatgagcgttaggacactattttaattatttttaatttattaatatttaaatatgtgaagctgagttaatttatgtaagtcatatttatatttttaagaagtaccacttgaaacattttatgtattagttttgaaataataatggaaagtggctatgcagtttgaatatcctttgtttcagagccagatcatttcttggaaagtgtaggcttacctcaaataaatggctaacttatacatatttttaaagaaatatttatattgtatttatataatgtataaatggtttttataccaataaatggcattttaaaaaattcagcaaaaaaaaaaaaaaaaaaa

SEQ ID NO: 113 - DNA, 3567 bp, Homo sapiens
  gene (1)..(3567): Accession No. NM_002198
agagctcgccactccttagtcgaggcaagacgtgcgcccgagccccgccgaaccgaggccacccggagccgtgcccagtccacgccggccgtgcccggcggccttaagaacccggcaacctctgccttcttccctcttccactcggagtcgcgctccgcgcgccctcactgcagcccctgcgtcgccgggaccctcgcgcgcgaccgccgaatcgctcctgcagcagagccaacatgcccatcactcggatgcgcatgagaccctggctagagatgcagattaattccaaccaaatcccggggctcatctggattaataaagaggagatgatcttccagatcccatggaagcatgctgccaagcatggctgggacatcaacaaggatgcctgtttgttccggagctgggccattcacacaggccgatacaaagcaggggaaaaggagccagatcccaagacgtggaaggccaactttcgctgtgccatgaactccctgccagatatcgaggaggtgaaagaccagagcaggaacaagggcagctcagctgtgcgagtgtaccggatgcttccacctctcaccaagaaccagagaaaagaaagaaagtcgaagtccagccgagatgctaagagcaaggccaagaggaagtcatgtggggattccagccctgataccttctctgatggactcagcagctccactctgcctgatgaccacagcagctacacagttccaggctacatgcaggacttggaggtggagcaggccctgactccagcactgtcgccatgtgctgtcagcagcactctccccgactggcacatcccagtggaagttgtgccggacagcaccagtgatctgtacaacttccaggtgtcacccatgccctccacctctgaagctacaacagatgaggatgaggaagggaaattacctgaggacatcatgaagctcttggagcagtcggagtggcagccaacaaacgtggatgggaaggggtacctactcaatgaacctggagtccagcccacctctgtctatggagactttagctgtaaggaggagccagaaattgacagcccagggggggatattgggctgagtctacagcgtgtcttcacagatctgaagaacatggatgccacctggctggacagcctgctgaccccagtccggttgccctccatccaggccattccctgtgcaccgtagcagggcccctgggcccctcttattcctctaggcaagcaggacctggcatcatggtggatatggtgcagagaagctggacttctgtgggcccctcaacagccaagtgtgaccccactgccaagtggggatggggcctccctccttgggtcattgacctctcagggcctggcaggccagtgtctgggtttttcttgtggtgtaaagctggccctgcctcctgggaagatgaggttctgagaccagtgtatcaggtcagggacttggacaggagtcagtgtctggctttttcctctgagcccagctgcctggagagggtctcgctgtcactggctggctcctaggggaacagaccagtgaccccagaaaagcataacaccaatcccagggctggctctgcactaagagaaaattgcactaaatgaatctcgttcccaaagaactacccccttttcagctgagccctggggactgttccaaagccagtgaaatgtgaaggaaagtggggtccttcggggcgatgctccctcagcctcagaggagctctaccctgctccctgctttggctgaggggcttgggaaaaaaacttggcactttttcgtgtggatcttgccacatttctgatcagaggtgtacactaacatttcccccgagctcttggcctttgcatttatttatacagtgccttgctcggcgcccaccaccccctcaagccccagcagccctcaacaggcccagggagggaagtgtgagcgccttggtatgacttaaaattggaaatgtcatctaaccattaagtcatgtgtgaacacataaggacgtgtgtaaatatgtacatttgtctttttataaaaagtaaattgtttataaggggtgtggcctttttagagagaaatttaacttgtagatgattttactttttatggaaacactgatggacttattattggcatcccgcctgaacttgactttggggtgaacagggacatgcatctattataaaatcctttcggccaggcgcggtggctcacacctgtaatcccagcactttgggaggccgagatgggtggatcacctgaggtcaggagttcgagaccagcctggtgaaactccatttctactaaaaatgcaaaaattagctgggcgtggttgcgggtgcttgtaatcccagctactcaggaggctgaggcaagagaatcgcttgaacctgggaggtggaggttgcagtgagccgagaacatgccattgcactccagcccgggcaccaaaaaaaaaaaaaaaaaaaaaaacctttcatttggccgggcatggtggcttatgcctgtaatcctggcactttgggaggccaaggtgggcagatcacctgaggtcaggagtttgagaccagcctggccaacatggtgaaacctcatctctactaaaaatacaaaaattaggccgggcacggtggctcacgcctgtaatcccagcactttgggaggcagaggcgggcggatcacgaggtcaggagatcaagaccatcctggctaacacggtgaaaccccgtctctactaaaaatataaaaaattagccgggcctagtggcgggtgcctgtagtcccagctactcgggaggctgaggcaggagaatggcatgaaccccggaggcagagcttgcagtgagccgagattgcaccactgcactacagcctgggcgacagagcgagactccgtctcaaaaaaaaaaaaaaaaattagccgggcctggtggcgggcgcctgtaatcccagctactgtggaggctgaagcacaagaatcacttgaacccgggagatggaggttgcagtgagctgagactgtgccactgcactccagcctgggtgacaagagtgagactttgtctcaaaaaaaaaaaaatccttttgtttatgttcacatagacaatggcagaaggaggggacattcctgtcataggaacatgcttatataaacatagtcacctgtccttgactatcaccagggctgtcagttgattctgggctcctggggcccaaggagtgttaagttttgaggcatgtgccataggtgatgtgtcctgctaacacacagatgctgctccaaaaagtcagttgatatgacacagtcacagacagaacagtcagcagcccaagaaaggtcctcacggctgctgtgctgggtagcacttgccatccagtttctagagtgatgaaatgctctgtctgtaccgttcaatacagtaggcactggcactagccacatgtgccagctaagcacttgaaatgtggccagtgcaataaggaattgaacttttaattgcatttaataaactgtatgtaaatagtcaaaaaaaaaaaaaa

SEQ ID NO: 114 - DNA, 1386 bp, Homo sapiens
  gene (1)..(1386): Accession No. NM_000595
gccccatctccttgggctgcccgtgcttcgtgctttggactaccgcccagcagtgtcctgccctctgcctgggcctcggtccctcctgcacctgctgcctggatccccggcctgcctgggcctgggccttggttctccccatgacaccacctgaacgtctcttcctcccaagggtgtgtggcaccaccctacacctcctccttctggggctgctgctggttctgctgcctggggcccaggggctccctggtgttggcctcacaccttcagctgcccagactgcccgtcagcaccccaagatgcatcttgcccacagcaccctcaaacctgctgctcacctcattggagaccccagcaagcagaactcactgctctggagagcaaacacggaccgtgccttcctccaggatggtttctccttgagcaacaattctctcctggtccccaccagtggcatctacttcgtctactcccaggtggtcttctctgggaaagcctactctcccaaggccacctcctccccactctacctggcccatgaggtccagctcttctcctcccagtaccccttccatgtgcctctcctcagctcccagaagatggtgtatccagggctgcaggaaccctggctgcactcgatgtaccacggggctgcgttccagctcacccagggagaccagctatccacccacacagatggcatcccccacctagtcctcagccctagtactgtcttctttggagccttcgctctgtagaacttggaaaaatccagaaagaaaaaataattgatttcaagaccttctccccattctgcctccattctgaccatttcaggggtcgtcaccacctctcctttggccattccaacagctcaagtcttccctgatcaagtcaccggagctttcaaagaaggaattctaggcatcccaggggaccacacctccctgaaccatccctgatgtctgtctggctgaggatttcaagcctgcctaggaattcccagcccaaagctgttggtctgtcccaccagctaggtggggcctagatccacacacagaggaagagcaggcacatggaggagcttgggggatgactagaggcagggaggggactatttatgaaggcaaaaaaattaaattatttatttatggaggatggagagaggggaataatagaagaacatccaaggagaaacagagacaggcccaagagatgaagagtgagagggcatgcgcacaaggctgaccaagagagaaagaagtaggcatgagggatcacagggccccagaaggcagggaaaggctctgaaagccagctgccgaccagagccccacacggaggcatctgcaccctcgatgaagcccaataaacctcttttctctg

SEQ ID NO: 115 - DNA, 4353 bp, Homo sapiens
  gene (1)..(4353): Accession No. NM_001315
ttctctcacgaagccccgcccgcggagaggttccatattgggtaaaatctcggctctcggagagtcccgggagctgttctcgcgagagtactgcgggaggctcccgtttgctggctcttggaaccgcgaccactggagccttagcgggcgcagcagctggaacgggagtactgcgacgcagcccggagtcggccttgtaggggcgaaggtgcagggagatcgcggcgggcgcagtcttgagcgccggagcgcgtccctgcccttagcggggcttgccccagtcgcaggggcacatccagccgctgcggctgacagcagccgcgcgcgcgggagtctgcggggtcgcggcagccgcacctgcgcgggcgaccagcgcaaggtccccgcccggctgggcgggcagcaagggccggggagagggtgcgggtgcaggcgggggccccacagggccaccttcttgcccggcggctgccgctggaaaatgtctcaggagaggcccacgttctaccggcaggagctgaacaagacaatctgggaggtgcccgagcgttaccagaacctgtctccagtgggctctggcgcctatggctctgtgtgtgctgcttttgacacaaaaacggggttacgtgtggcagtgaagaagctctccagaccatttcagtccatcattcatgcgaaaagaacctacagagaactgcggttacttaaacatatgaaacatgaaaatgtgattggtctgttggacgtttttacacctgcaaggtctctggaggaattcaatgatgtgtatctggtgacccatctcatgggggcagatctgaacaacattgtgaaatgtcagaagcttacagatgaccatgttcagttccttatctaccaaattctccgaggtctaaagtatatacattcagctgacataattcacagggacctaaaacctagtaatctagctgtgaatgaagactgtgagctgaagattctggattttggactggctcggcacacagatgatgaaatgacaggctacgtggccactaggtggtacagggctcctgagatcatgctgaactggatgcattacaaccagacagttgatatttggtcagtgggatgcataatggccgagctgttgactggaagaacattgtttcctggtacagaccatattaaccagcttcagcagattatgcgtctgacaggaacaccccccgcttatctcattaacaggatgccaagccatgaggcaagaaactatattcagtctttgactcagatgccgaagatgaactttgcgaatgtatttattggtgccaatcccctggctgtcgacttgctggagaagatgcttgtattggactcagataagagaattacagcggcccaagcccttgcacatgcctactttgctcagtaccacgatcctgatgatgaaccagtggccgatccttatgatcagtcctttgaaagcagggacctccttatagatgagtggaaaagcctgacctatgatgaagtcatcagctttgtgccaccaccccttgaccaagaagagatggagtcctgagcacctggtttctgttctgttgatcccacttcactgtgaggggaaggccttttcacgggaactctccaaatattattcaagtgcctcttgttgcagagatttcctccatggtggaagggggtgtgcgtgcgtgtgcgtgcgtgttagtgtgtgtgcatgtgtgtgtctgtctttgtgggagggtaagacaatatgaacaaactatgatcacagtgactttacaggaggttgtggatgctccagggcagcctccaccttgctcttctttctgagagttggctcaggcagacaagagctgctgtccttttaggaatatgttcaatgcaaagtaaaaaaatatgaattgtccccaatcccggtcatgcttttgccactttggcttctcctgtgaccccaccttgacggtggggcgtagacttgacaacatcccacagtggcacggagagaaggcccataccttctggttgcttcagacctgacaccgtccctcagtgatacgtacagccaaaaaggaccaactggcttctgtgcactagcctgtgattaacttgcttagtatggttctcagatcttgacagtatatttgaaactgtaaatatgtttgtgccttaaaaggagagaagaaagtgtagatagttaaaagactgcagctgctgaagttctgagccgggcaagtcgagagggctgttggacagctgcttgtgggcccggagtaatcaggcagccttcataggcggtcatgtgtgcatgtgagcacatgcgtatatgtgcgtctctctttctccctcacccccaggtgttgccatttctctgcttacccttcacctttggtgcagaggtttcttgaatatctgccccagtagtcagaagcaggttcttgatgtcatgtacttcctgtgtactctttatttctagcagagtgaggatgtgttttgcacgtcttgctatttgagcatgcacagctgcttgtcctgctctcttcaggaggccctggtgtcaggcaggtttgccagtgaagacttcttgggtagtttagatcccatgtcacctcagctgatattatggcaagtgatatcacctctcttcagcccctagtgctattctgtgttgaacacaattgatacttcaggtgcttttgatgtgaaaatcatgaaaagaggaacaggtggatgtatagcatttttattcatgccatctgttttcaaccaactatttttgaggaattatcatgggaaaagaccagggcttttcccaggaatatcccaaacttcggaaacaagttattctcttcactcccaataactaatgctaagaaatgctgaaaatcaaagtaaaaaattaaagcccataaggccagaaactccttttgctgtctttctctaaatatgattactttaaaataaaaaagtaacaaggtgtcttttccactcctatggaaaagggtcttcttggcagcttaacattgacttcttggtttggggagaaataaattttgtttcagaattttgtatattgtaggaatcctttgagaatgtgattccttttgatggggagaaagggcaaattattttaatattttgtattttcaactttataaagataaaatatcctcaggggtggagaagtgtcgttttcataacttgctgaatttcaggcattttgttctacatgaggactcatatatttaagccttttgtgtaataagaaagtataaagtcacttccagtgttggctgtgtgacagaatcttgtatttgggccaaggtgtttccatttctcaatcagtgcagtgatacatgtactccagagggacagggtggaccccctgagtcaactggagcaagaaggaaggaggcagactgatggcgattccctctcacccgggactctccccctttcaaggaaagtgaacctttaaagtaaaggcctcatctcctttattgcagttcaaatcctcaccatccacagcaagatgaattttatcagccatgtttggttgtaaatgctcgtgtgatttcctacagaaatactgctctgaatattttgtaataaaggtctttgcacatgtgaccacatacgtgttaggaggctgcatgctctggaagcctggactctaagctggagctcttggaagagctcttcggtttctgagcataatgctcccatctcctgatttctctgaacagaaaacaaaagagagaatgagggaaattgctattttatttgtattcatgaacttggctgtaatcagttatgccgtataggatgtcagacaataccactggttaaaataaagcctatttttcaaatttagtgagtttctcaagtttattatatttttctcttgtttttatttaatgcacaatatggcattatatcaatatcctttaaactgtgacctggcatacttgtctgacagatcttaatactactcctaacatttagaaaatgttgataaagcttcttagttgtacattttttggtgaagagtatccaggtctttgctgtggatgggtaaagcaaagagcaaatgaacgaagtattaagcattggggcctgtcttatctacactcgagtgtaagagtggccgaaatgacagggctcagcagactgtggcctgagggccaaatctggcccaccacctgtttggtgtagcctgctaagaatggcttttacatttttaaatggttgggaaagaaaaaaaaagaagtagtagattttgtagcatgtgatgtaagtaatgtaaaacttaaattccagtatccataaataaagttttatgagaacaga

SEQ ID NO: 116 - DNA, 4654 bp, Homo sapiens
  gene (1)..(4654): Accession No. NM_000246
ggttagtgatgaggctagtgatgaggctgtgtgcttctgagctgggcatccgaaggcatccttggggaagctgagggcacgaggaggggctgccagactccgggagctgctgcctggctgggattcctacacaatgcgttgcctggctccacgccctgctgggtcctacctgtcagagccccaaggcagctcacagtgtgccaccatggagttggggcccctagaaggtggctacctggagcttcttaacagcgatgctgaccccctgtgcctctaccacttctatgaccagatggacctggctggagaagaagagattgagctctactcagaacccgacacagacaccatcaactgcgaccagttcagcaggctgttgtgtgacatggaaggtgatgaagagaccagggaggcttatgccaatatcgcggaactggaccagtatgtcttccaggactcccagctggagggcctgagcaaggacattttcaagcacataggaccagatgaagtgatcggtgagagtatggagatgccagcagaagttgggcagaaaagtcagaaaagacccttcccagaggagcttccggcagacctgaagcactggaagccagctgagccccccactgtggtgactggcagtctcctagtgggaccagtgagcgactgctccaccctgccctgcctgccactgcctgcgctgttcaaccaggagccagcctccggccagatgcgcctggagaaaaccgaccagattcccatgcctttctccagttcctcgttgagctgcctgaatctccctgagggacccatccagtttgtccccaccatctccactctgccccatgggctctggcaaatctctgaggctggaacaggggtctccagtatattcatctaccatggtgaggtgccccaggccagccaagtaccccctcccagtggattcactgtccacggcctcccaacatctccagaccggccaggctccaccagccccttcgctccatcagccactgacctgcccagcatgcctgaacctgccctgacctcccgagcaaacatgacagagcacaagacgtcccccacccaatgcccggcagctggagaggtctccaacaagcttccaaaatggcctgagccggtggagcagttctaccgctcactgcaggacacgtatggtgccgagcccgcaggcccggatggcatcctagtggaggtggatctggtgcaggccaggctggagaggagcagcagcaagagcctggagcgggaactggccaccccggactgggcagaacggcagctggcccaaggaggcctggctgaggtgctgttggctgccaaggagcaccggcggccgcgtgagacacgagtgattgctgtgctgggcaaagctggtcagggcaagagctattgggctggggcagtgagccgggcctgggcttgtggccggcttccccagtacgactttgtcttctctgtcccctgccattgcttgaaccgtccgggggatgcctatggcctgcaggatctgctcttctccctgggcccacagccactcgtggcggccgatgaggttttcagccacatcttgaagagacctgaccgcgttctgctcatcctagacggcttcgaggagctggaagcgcaagatggcttcctgcacagcacgtgcggaccggcaccggcggagccctgctccctccgggggctgctggccggccttttccagaagaagctgctccgaggttgcaccctcctcctcacagcccggccccggggccgcctggtccagagcctgagcaaggccgacgccctatttgagctgtccggcttctccatggagcaggcccaggcatacgtgatgcgctactttgagagctcagggatgacagagcaccaagacagagccctgacgctcctccgggaccggccacttcttctcagtcacagccacagccctactttgtgccgggcagtgtgccagctctcagaggccctgctggagcttggggaggacgccaagctgccctccacgctcacgggactctatgtcggcctgctgggccgtgcagccctcgacagcccccccggggccctggcagagctggccaagctggcctgggagctgggccgcagacatcaaagtaccctacaggaggaccagttcccatccgcagacgtgaggacctgggcgatggccaaaggcttagtccaacacccaccgcgggccgcagagtccgagctggccttccccagcttcctcctgcaatgcttcctgggggccctgtggctggctctgagtggcgaaatcaaggacaaggagctcccgcagtacctagcattgaccccaaggaagaagaggccctatgacaactggctggagggcgtgccacgctttctggctgggctgatcttccagcctcccgcccgctgcctgggagccctactcgggccatcggcggctgcctcggtggacaggaagcagaaggtgcttgcgaggtacctgaagcggctgcagccggggacactgcgggcgcggcagctgctggagctgctgcactgcgcccacgaggccgaggaggctggaatttggcagcacgtggtacaggagctccccggccgcctctcttttctgggcacccgcctcacgcctcctgatgcacatgtactgggcaaggccttggaggcggcgggccaagacttctccctggacctccgcagcactggcatttgcccctctggattggggagcctcgtgggactcagctgtgtcacccgtttcagggctgccttgagcgacacggtggcgctgtgggagtccctgcagcagcatggggagaccaagctacttcaggcagcagaggagaagttcaccatcgagcctttcaaagccaagtccctgaaggatgtggaagacctgggaaagcttgtgcagactcagaggacgagaagttcctcggaagacacagctggggagctccctgctgttcgggacctaaagaaactggagtttgcgctgggccctgtctcaggcccccaggctttccccaaactggtgcggatcctcacggccttttcctccctgcagcatctggacctggatgcgctgagtgagaacaagatcggggacgagggtgtctcgcagctctcagccaccttcccccagctgaagtccttggaaaccctcaatctgtcccagaacaacatcactgacctgggtgcctacaaactcgccgaggccctgccttcgctcgctgcatccctgctcaggctaagcttgtacaataactgcatctgcgacgtgggagccgagagcttggctcgtgtgcttccggacatggtgtccctccgggtgatggacgtccagtacaacaagttcacggctgccggggcccagcagctcgctgccagccttcggaggtgtcctcatgtggagacgctggcgatgtggacgcccaccatcccattcagtgtccaggaacacctgcaacaacaggattcacggatcagcctgagatgatcccagctgtgctctggacaggcatgttctctgaggacactaaccacgctggaccttgaactgggtacttgtggacacagctcttctccaggctgtatcccatgagcctcagcatcctggcacccggcccctgctggttcagggttggcccctgcccggctgcggaatgaaccacatcttgctctgctgacagacacaggcccggctccaggctcctttagcgcccagttgggtggatgcctggtggcagctgcggtccacccaggagccccgaggccttctctgaaggacattgcggacagccacggccaggccagagggagtgacagaggcagccccattctgcctgcccaggcccctgccaccctggggagaaagtacttctttttttttatttttagacagagtctcactgttgcccaggctggcgtgcagtggtgcgatctgggttcactgcaacctccgcctcttgggttcaagcgattcttctgcttcagcctcccgagtagctgggactacaggcacccaccatcatgtctggctaatttttcatttttagtagagacagggttttgccatgttggccaggctggtctcaaactcttgacctcaggtgatccacccacctcagcctcccaaagtgctgggattacaagcgtgagccactgcaccgggccacagagaaagtacttctccaccctgctctccgaccagacaccttgacagggcacaccgggcactcagaagacactgatgggcaacccccagcctgctaattccccagattgcaacaggctgggcttcagtggcagctgcttttgtctatgggactcaatgcactgacattgttggccaaagccaaagctaggcctggccagatgcaccagcccttagcagggaaacagctaatgggacactaatggggcggtgagaggggaacagactggaagcacagcttcatttcctgtgtcttttttcactacattataaatgtctctttaatgtcacaggcaggtccagggtttgagttcataccctgttaccattttggggtacccactgctctggttatctaatatgtaacaagccaccccaaatcatagtggcttaaaacaacactcacattta

SEQ ID NO: 117 - DNA, 561 bp, Homo sapiens
  gene (1)..(561): Accession No. NM_002415
accacagtggtgtccgagaagtcaggcacgtagctcagcggcggccgcggcgcgtgcgtctgtgcctctgcgcgggtctcctggtccttctgccatcatgccgatgttcatcgtaaacaccaacgtgccccgcgcctccgtgccggacgggttcctctccgagctcacccagcagctggcgcaggccaccggcaagcccccccagtacatcgcggtgcacgtggtcccggaccagctcatggccttcggcggctccagcgagccgtgcgcgctctgcagcctgcacagcatcggcaagatcggcggcgcgcagaaccgctcctacagcaagctgctgtgcggcctgctggccgagcgcctgcgcatcagcccggacagggtctacatcaactattacgacatgaacgcggccaatgtgggctggaacaactccaccttcgcctaagagccgcagggacccacgctgtctgcgctggctccacccgggaacccgccgcacgctgtgttctaggcccgcccaccccaaccttctggtggggagaaataaacggtttagagact

SEQ ID NO: 118 - DNA, 1877 bp, Homo sapiens
  gene (1)..(1877): Accession No. NM_002426
cagaacccggactaagggctatataaagaggaacagttcaggaacttaggctagaaaggaacacagtaaactgaattgatccgtttagaagtttacaatgaagtttcttctaatactgctcctgcaggccactgcttctggagctcttcccctgaacagctctacaagcctggaaaaaaataatgtgctatttggtgaaagatacttagaaaaattttatggccttgagataaacaaacttccagtgacaaaaatgaaatatagtggaaacttaatgaaggaaaaaatccaagaaatgcagcacttcttgggtctgaaagtgaccgggcaactggacacatctaccctggagatgatgcacgcacctcgatgtggagtccccgatgtccatcatttcagggaaatgccaggggggcccgtatggaggaaacattatatcacctacagaatcaataattacacacctgacatgaaccgtgaggatgttgactacgcaatccggaaagctttccaagtatggagtaatgttacccccttgaaattcagcaagattaacacaggcatggctgacattttggtggtttttgcccgtggagctcatggagacttccatgcttttgatggcaaaggtggaatcctagcccatgcttttggacctggatctggcattggaggggatgcacatttcgatgaggacgaattctggactacacattcaggaggcacaaacttgttcctcactgctgttcacgagattggccattccttaggtcttggccattctagtgatccaaaggccgtaatgttccccacctacaaatatgttgacatcaacacatttcgcctctctgctgatgacatacgtggcattcagtccctgtatggagacccaaaagagaaccaacgcttgccaaatcctgacaattcagaaccagctctctgtgaccccaatttgagttttgatgctgtcactaccgtgggaaataagatctttttcttcaaagacaggttcttctggctgaaggtttctgagagaccaaagaccagtgttaatttaatttcttccttatggccaaccttgccatctggcattgaagctgcttatgaaattgaagccagaaatcaagtttttctttttaaagatgacaaatactggttaattagcaatttaagaccagagccaaattatcccaagagcatacattcttttggttttcctaactttgtgaaaaaaattgatgcagctgtttttaacccacgtttttataggacctacttctttgtagataaccagtattggaggtatgatgaaaggagacagatgatggaccctggttatcccaaactgattaccaagaacttccaaggaatcgggcctaaaattgatgcagtcttctactctaaaaacaaatactactatttcttccaaggatctaaccaatttgaatatgacttcctactccaacgtatcaccaaaacactgaaaagcaatagctggtttggttgttagaaatggtgtaattaatggtttttgttagttcacttcagcttaataagtatttattgcatatttgctatgtcctcagtgtaccactacttagagatatgtatcataaaaataaaatctgtaaaccataggtaatgattatataaaatacataatatttttcaattttgaaaactctaattgtccattcttgcttgactctactattaagtttgaaaatagttaccttcaaaggccaagagaattctatttgaagcatgctctgtaagttgcttcctaacatccttggactgagaaattatacttacttctggcataactaaaattaagtatatatattttggctcaaataaaattgaaaaaaaaatca

SEQ ID NO: 119 - DNA, 2387 bp, Homo sapiens
  gene (1)..(2387): Accession No. NM_004994
agacacctctgccctcaccatgagcctctggcagcccctggtcctggtgctcctggtgctgggctgctgctttgctgcccccagacagcgccagtccacccttgtgctcttccctggagacctgagaaccaatctcaccgacaggcagctggcagaggaatacctgtaccgctatggttacactcgggtggcagagatgcgtggagagtcgaaatctctggggcctgcgctgctgcttctccagaagcaactgtccctgcccgagaccggtgagctggatagcgccacgctgaaggccatgcgaaccccacggtgcggggtcccagacctgggcagattccaaacctttgagggcgacctcaagtggcaccaccacaacatcacctattggatccaaaactactcggaagacttgccgcgggcggtgattgacgacgcctttgcccgcgccttcgcactgtggagcgcggtgacgccgctcaccttcactcgcgtgtacagccgggacgcagacatcgtcatccagtttggtgtcgcggagcacggagacgggtatcccttcgacgggaaggacgggctcctggcacacgcctttcctcctggccccggcattcagggagacgcccatttcgacgatgacgagttgtggtccctgggcaagggcgtcgtggttccaactcggtttggaaacgcagatggcgcggcctgccacttccccttcatcttcgagggccgctcctactctgcctgcaccaccgacggtcgctccgacggcttgccctggtgcagtaccacggccaactacgacaccgacgaccggtttggcttctgccccagcgagagactctacacccaggacggcaatgctgatgggaaaccctgccagtttccattcatcttccaaggccaatcctactccgcctgcaccacggacggtcgctccgacggctaccgctggtgcgccaccaccgccaactacgaccgggacaagctcttcggcttctgcccgacccgagctgactcgacggtgatggggggcaactcggcgggggagctgtgcgtcttccccttcactttcctgggtaaggagtactcgacctgtaccagcgagggccgcggagatgggcgcctctggtgcgctaccacctcgaactttgacagcgacaagaagtggggcttctgcccggaccaaggatacagtttgttcctcgtggcggcgcatgagttcggccacgcgctgggcttagatcattcctcagtgccggaggcgctcatgtaccctatgtaccgcttcactgaggggccccccttgcataaggacgacgtgaatggcatccggcacctctatggtcctcgccctgaacctgagccacggcctccaaccaccaccacaccgcagcccacggctcccccgacggtctgccccaccggaccccccactgtccacccctcagagcgccccacagctggccccacaggtcccccctcagctggccccacaggtccccccactgctggcccttctacggccactactgtgcctttgagtccggtggacgatgcctgcaacgtgaacatcttcgacgccatcgcggagattgggaaccagctgtatttgttcaaggatgggaagtactggcgattctctgagggcagggggagccggccgcagggccccttccttatcgccgacaagtggcccgcgctgccccgcaagctggactcggtctttgaggagcggctctccaagaagcttttcttcttctctgggcgccaggtgtgggtgtacacaggcgcgtcggtgctgggcccgaggcgtctggacaagctgggcctgggagccgacgtggcccaggtgaccggggccctccggagtggcagggggaagatgctgctgttcagcgggcggcgcctctggaggttcgacgtgaaggcgcagatggtggatccccggagcgccagcgaggtggaccggatgttccccggggtgcctttggacacgcacgacgtcttccagtaccgagagaaagcctatttctgccaggaccgcttctactggcgcgtgagttcccggagtgagttgaaccaggtggaccaagtgggctacgtgacctatgacatcctgcagtgccctgaggactagggctcccgtcctgctttggcagtgccatgtaaatccccactgggaccaaccctggggaaggagccagtttgccggatacaaactggtattctgttctggaggaaagggaggagtggaggtgggctgggccctctcttctcacctttgttttttgttggagtgtttctaataaacttggattctctaacctttaaaaaaaaaaaaaaaaaaaaaaaaaaaaaaaaaaaaaaaaaaaaaaaaaaaa

SEQ ID NO: 120 - DNA, 1670 bp, Homo sapiens
  gene (1)..(1670): Accession No. NM_002432
attgagagtggctctaacaagtgccatttttccttgttagctttcatttctcagccctttacaagattaaaatagtctgcagtttaatctctccaaagctttacggacagtgattctgtcctaaacaagacagtgactccaggatttctgaagactattgtggaagaagcatccattaaggccaagctataacatcagaaatggtgaatgaatacaagaaaattcttttgctgaaaggatttgagctcatggatgattatcattttacatcaattaagtccttactggcctatgatttaggactaactacaaaaatgcaagaggaatacaacagaattaagattacagatttgatggaaaaaaagttccaaggcgttgcctgtctagacaaactaatagaacttgccaaagatatgccatcacttaaaaaccttgttaacaatcttcgaaaagagaagtcaaaagttgctaagaaaattaaaacacaagaaaaagctccagtgaaaaaaataaaccaggaagaagtgggtcttgcggcacctgcacccaccgcaagaaacaaactgacatcggaagcaagagggaggattcctgtagctcagaaaagaaaaactccaaacaaagaaaagactgaagccaaaaggaataaggtgtcccaagagcagagtaagcccccaggtccctcaggagccagcacatctgcagctgtggatcatcccccactaccccagacctcatcatcaactccatccaacacttcgtttactccgaatcaggaaacccaggcccaacggcaggtggatgcaagaagaaatgttccccaaaacgacccagtgacagtggtggtactgaaagcaacagcgccatttaaatacgagtccccagaaaatgggaaaagcacaatgtttcatgctacagtggccagtaagactcaatatttccatgtgaaagtcttcgacatcaacttgaaagagaaatttgtaaggaagaaggtcattaccatatctgattactctgaatgtaaaggagtaatggaaataaaggaagcatcatctgtgtctgactttaatcaaaattttgaggtcccaaacagaattatcgaaatagcaaataaaactcccaagatcagtcaactttacaagcaagcatctggaacaatggtgtatgggttgtttatgttacaaaagaaaagcgtacacaagaagaacacaatttatgaaatacaggataatacaggatccatggatgtagtggggagtggaaaatggcacaatatcaagtgtgagaaaggagataaacttcgactcttctgccttcaactgagaacagttgaccgcaagctgaaactggtgtgtggaagtcacagcttcatcaaggtcatcaaggccaagaaaaacaaggaaggaccaatgaatgttaattgaaatatgaaagctgaaatgcaacaaacaacttccgcttaaaacaattaagttgttaataactgtgattttgtaaatttcagtaattcatttaaatgatgtttcagtagatatattctagcatattaagagcttttataactgagttatagattagtttgctttctggaataaaattttcttcttatactcttccttttttttagatattacattttgcttttatgacattcacgaggcaaaaaaccg

SEQ ID NO: 121 - DNA, 1880 bp, Homo sapiens
  gene (1)..(1880): Accession No. NM_005084
gggtcggggccacaaggccgcgctaggcggacccaggacacagcccgcgcgcagcccacccgcccgccgcctgccagagctgctcggcccgcagccagggggacagcggctggtcggaggctcgcagtgctgtcggcgagaagcagtcgggtttggagcgcttgggtcgcgttggtgcgcggtggaacgcgcccagggaccccagttcccgcgagcagctccgcgccgcgcctgagagactaagctgaaactgctgctcagctcccaagatggtgccacccaaattgcatgtgcttttctgcctctgcggctgcctggctgtggtttatccttttgactggcaatacataaatcctgttgcccatatgaaatcatcagcatgggtcaacaaaatacaagtactgatggctgctgcaagctttggccaaactaaaatcccccggggaaatgggccttattccgttggttgtacagacttaatgtttgatcacactaataagggcaccttcttgcgtttatattatccatcccaagataatgatcgccttgacaccctttggatcccaaataaagaatatttttggggtcttagcaaatttcttggaacacactggcttatgggcaacattttgaggttactctttggttcaatgacaactcctgcaaactggaattcccctctgaggcctggtgaaaaatatccacttgttgttttttctcatggtcttggggcattcaggacactttattctgctattggcattgacctggcatctcatgggtttatagttgctgctgtagaacacagagatagatctgcatctgcaacttactatttcaaggaccaatctgctgcagaaataggggacaagtcttggctctaccttagaaccctgaaacaagaggaggagacacatatacgaaatgagcaggtacggcaaagagcaaaagaatgttcccaagctctcagtctgattcttgacattgatcatggaaagccagtgaagaatgcattagatttaaagtttgatatggaacaactgaaggactctattgatagggaaaaaatagcagtaattggacattcttttggtggagcaacggttattcagactcttagtgaagatcagagattcagatgtggtattgccctggatgcatggatgtttccactgggtgatgaagtatattccagaattcctcagcccctcttttttatcaactctgaatatttccaatatcctgctaatatcataaaaatgaaaaaatgctactcacctgataaagaaagaaagatgattacaatcaggggttcagtccaccagaattttgctgacttcacttttgcaactggcaaaataattggacacatgctcaaattaaagggagacatagattcaaatgtagctattgatcttagcaacaaagcttcattagcattcttacaaaagcatttaggacttcataaagattttgatcagtgggactgcttgattgaaggagatgatgagaatcttattccagggaccaacattaacacaaccaatcaacacatcatgttacagaactcttcaggaatagagaaatacaattaggattaaaataggttttttaaaagtcttgtttcaaaactgtctaaaattatgtgtgtgtgtgtgtgtgtgtgtgtgtgtgtgagagagagagagagagagagagagagagagagagagaattttaatgtattttcccaaaggactcatattttaaaatgtaggctatactgtaatcgtgattgaagcttggactaagaattttttccctttagatgtaaagaaagaatacagtatacaatattcaaaaaaaaaaaaaaaaaaaaaaaaaaaaaaaaaaaaaaaaaa

SEQ ID NO: 122 - DNA, 1548 bp, Homo sapiens
  gene (1)..(1548): Accession No. NM_002659
cagggccgagccagccccttcaccaccagccggccgcgccccgggaagggaagtttgtggcggaggaggttcgtacgggaggagggggaggcgcccacgcatctggggctgactcgctctttcgcaaaacgtctgggaggagtccctggggccacaaaactgcctccttcctgaggccagaaggagagaagacgtgcagggaccccgcgcacaggagctgccctcgcgacatgggtcacccgccgctgctgccgctgctgctgctgctccacacctgcgtcccagcctcttggggcctgcggtgcatgcagtgtaagaccaacggggattgccgtgtggaagagtgcgccctgggacaggacctctgcaggaccacgatcgtgcgcttgtgggaagaaggagaagagctggagctggtggagaaaagctgtacccactcagagaagaccaacaggaccctgagctatcggactggcttgaagatcaccagccttaccgaggttgtgtgtgggttagacttgtgcaaccagggcaactctggccgggctgtcacctattcccgaagccgttacctcgaatgcatttcctgtggctcatcagacatgagctgtgagaggggccggcaccagagcctgcagtgccgcagccctgaagaacagtgcctggatgtggtgacccactggatccaggaaggtgaagaagggcgtccaaaggatgaccgccacctccgtggctgtggctaccttcccggctgcccgggctccaatggtttccacaacaacgacaccttccacttcctgaaatgctgcaacaccaccaaatgcaacgagggcccaatcctggagcttgaaaatctgccgcagaatggccgccagtgttacagctgcaaggggaacagcacccatggatgctcctctgaagagactttcctcattgactgccgaggccccatgaatcaatgtctggtagccaccggcactcacgaaccgaaaaaccaaagctatatggtaagaggctgtgcaaccgcctcaatgtgccaacatgcccacctgggtgacgccttcagcatgaaccacattgatgtctcctgctgtactaaaagtggctgtaaccacccagacctggatgtccagtaccgcagtggggctgctcctcagcctggccctgcccatctcagcctcaccatcaccctgctaatgactgccagactgtggggaggcactctcctctggacctaaacctgaaatccccctctctgccctggctggatccgggggacccctttgcccttccctcggctcccagccctacagacttgctgtgtgacctcaggccagtgtgccgacctctctgggcctcagttttcccagctatgaaaacagctatctcacaaagttgtgtgaagcagaagagaaaagctggaggaaggccgtgggccaatgggagagctcttgttattattaatattgttgccgctgttgtgttgttgttattaattaatattcatattatttattttatacttacataaagattttgtaccagtgg

SEQ ID NO: 123 - DNA, 5330 bp, Homo sapiens
  gene (1)..(5330): Accession No. NM_002838
agtatttttggagaagttagtaaaaccgaatctgacatcatcacctagcagttcatgcagctagcaagtggtttgttcttagggtaacagaggaggaaattgttcctcgtctgataagacaacagtggagaaaggacgcatgctgtttcttagggacacggctgacttccagatatgaccatgtatttgtggcttaaactcttggcatttggctttgcctttctggacacagaagtatttgtgacagggcaaagcccaacaccttcccccactggattgactacagcaaagatgcccagtgttccactttcaagtgaccccttacctactcacaccactgcattctcacccgcaagcacctttgaaagagaaaatgacttctcagagaccacaacttctcttagtccagacaatacttccacccaagtatccccggactctttggataatgctagtgcttttaataccacaggtgtttcatcagtacagacgcctcaccttcccacgcacgcagactcgcagacgccctctgctggaactgacacgcagacattcagcggctccgccgccaatgcaaaactcaaccctaccccaggcagcaatgctatctcagatgtcccaggagagaggagtacagccagcacctttcctacagacccagtttccccattgacaaccaccctcagccttgcacaccacagctctgctgccttacctgcacgcacctccaacaccaccatcacagcgaacacctcagatgcctaccttaatgcctctgaaacaaccactctgagcccttctggaagcgctgtcatttcaaccacaacaatagctactactccatctaagccaacatgtgatgaaaaatatgcaaacatcactgtggattacttatataacaaggaaactaaattatttacagcaaagctaaatgttaatgagaatgtggaatgtggaaacaatacttgcacaaacaatgaggtgcataaccttacagaatgtaaaaatgcgtctgtttccatatctcataattcatgtactgctcctgataagacattaatattagatgtgccaccaggggttgaaaagtttcagttacatgattgtacacaagttgaaaaagcagatactactatttgtttaaaatggaaaaatattgaaacctttacttgtgatacacagaatattacctacagatttcagtgtggtaatatgatatttgataataaagaaattaaattagaaaaccttgaacccgaacatgagtataagtgtgactcagaaatactctataataaccacaagtttactaacgcaagtaaaattattaaaacagattttgggagtccaggagagcctcagattattttttgtagaagtgaagctgcacatcaaggagtaattacctggaatccccctcaaagatcatttcataattttaccctctgttatataaaagagacagaaaaagattgcctcaatctggataaaaacctgatcaaatatgatttgcaaaatttaaaaccttatacgaaatatgttttatcattacatgcctacatcattgcaaaagtgcaacgtaatggaagtgctgcaatgtgtcatttcacaactaaaagtgctcctccaagccaggtctggaacatgactgtctccatgacatcagataatagtatgcatgtcaagtgtaggcctcccagggaccgtaatggcccccatgaacgttaccatttggaagttgaagctggaaatactctggttagaaatgagtcgcataagaattgcgatttccgtgtaaaagatcttcaatattcaacagactacacttttaaggcctattttcacaatggagactatcctggagaaccctttattttacatcattcaacatcttataattctaaggcactgatagcatttctggcatttctgattattgtgacatcaatagccctgcttgttgttctctacaaaatctatgatctacataagaaaagatcctgcaatttagatgaacagcaggagcttgttgaaagggatgatgaaaaacaactgatgaatgtggagccaatccatgcagatattttgttggaaacttataagaggaagattgctgatgaaggaagactttttctggctgaatttcagagcatcccgcgggtgttcagcaagtttcctataaaggaagctcgaaagccctttaaccagaataaaaaccgttatgttgacattcttccttatgattataaccgtgttgaactctctgagataaacggagatgcagggtcaaactacataaatgccagctatattgatggtttcaaagaacccaggaaatacattgctgcacaaggtcccagggatgaaactgttgatgatttctggaggatgatttgggaacagaaagccacagttattgtcatggtcactcgatgtgaagaaggaaacaggaacaagtgtgcagaatactggccgtcaatggaagagggcactcgggcttttggagatgttgttgtaaagatcaaccagcacaaaagatgtccagattacatcattcagaaattgaacattgtaaataaaaaagaaaaagcaactggaagagaggtgactcacattcagttcaccagctggccagaccacggggtgcctgaggatcctcacttgctcctcaaactgagaaggagagtgaatgccttcagcaatttcttcagtggtcccattgtggtgcactgcagtgctggtgttgggcgcacaggaacctatatcggaattgatgccatgctagaaggcctggaagccgagaacaaagtggatgtttatggttatgttgtcaagctaaggcgacagagatgcctgatggttcaagtagaggcccagtacatcttgatccatcaggctttggtggaatacaatcagtttggagaaacagaagtgaatttgtctgaattacatccatatctacataacatgaagaaaagggatccacccagtgagccgtctccactagaggctgaattccagagacttccttcatataggagctggaggacacagcacattggaaatcaagaagaaaataaaagtaaaaacaggaattctaatgtcatcccatatgactataacagagtgccacttaaacatgagctggaaatgagtaaagagagtgagcatgattcagatgaatcctctgatgatgacagtgattcagaggaaccaagcaaatacatcaatgcatcttttataatgagctactggaaacctgaagtgatgattgctgctcagggaccactgaaggagaccattggtgacttttggcagatgatcttccaaagaaaagtcaaagttattgttatgctgacagaactgaaacatggagaccaggaaatctgtgctcagtactggggagaaggaaagcaaacatatggagatattgaagttgacctgaaagacacagacaaatcttcaacttatacccttcgtgtctttgaactgagacattccaagaggaaagactctcgaactgtgtaccagtaccaatatacaaactggagtgtggagcagcttcctgcagaacccaaggaattaatctctatgattcaggtcgtcaaacaaaaacttccccagaagaattcctctgaagggaacaagcatcacaagagtacacctctactcattcactgcagggatggatctcagcaaacgggaatattttgtgctttgttaaatctcttagaaagtgcggaaacagaagaggtagtggatatttttcaagtggtaaaagctctacgcaaagctaggccaggcatggtttccacattcgagcaatatcaattcctatatgacgtcattgccagcacctaccctgctcagaatggacaagtaaagaaaaacaaccatcaagaagataaaattgaatttgataatgaagtggacaaagtaaagcaggatgctaattgtgttaatccacttggtgccccagaaaagctccctgaagcaaaggaacaggctgaaggttctgaacccacgagtggcactgaggggccagaacattctgtcaatggtcctgcaagtccagctttaaatcaaggttcataggaaaagacataaatgaggaaactccaaacctcctgttagctgttatttctatttttgtagaagtaggaagtgaaaataggtatacagtggattaattaaatgcagcgaaccaatatttgtagaagggttatattttactactgtggaaaaatatttaagatagttttgccagaacagtttgtacagacgtatgcttattttaaaattttatctcttattcagtaaaaaacaacttctttgtaatcgttatgtgtgtatatgtatgtgtgtatgggtgtgtgtttgtgtgagagacagagaaagagagagaattctttcaagtgaatctaaaagcttttgcttttcctttgtttttatgaagaaaaaatacattttatattagaagtgttaacttagcttgaaggatctgtttttaaaaatcataaactgtgtgcagactcaataaaatcatgtacatttctgaaatgacctcaagatgtcctccttgttctactcatatatatctatcttatatagtttactattttacttctagagatagtacataaaggtggtatgtgtgtgtatgctactacaaaaaagttgttaactaaattaacattgggaaatcttatattccatatattagcatttagtccaatgtctttttaagcttatttaattaaaaaatttccagtgagcttatcatgctgtctttacatggggttttcaattttgcatgctcgattattccctgtacaatatttaaaatttattgcttgatacttttgacaacaaattaggttttgtacaattgaacttaaataaatgtcattaaaataaataaatgcaatatgtattaatattcattgtataaaaatagaagaatacaaacatatttgttaaatatttacatatgaaatttaatatagctatttttatggaatttttcattgatatgaaaaatatgatattgcatatgcatagttcccatgttaaatcccattcataactttcattaaagcatttactttgaatttctccaatgcttagaatgtttttaccaggaatggatgtcgctaatcataataaaattcaaccattatttttttcttgtttataatacattgtgttatatgttcaaatatgaaatgtgtatgcacctattgaaatatgtttaatgcatttattaacatttgcaggacacttttacaggccccaattatccaatagtctaataattgtttaagatctag

SEQ ID NO: 124 - DNA, 3220 bp, Homo sapiens
  gene (1)..(3220): Accession No. NM_000295
acaatgactcctttcggtaagtgcagtggaagctgtacactgcccaggcaaagcgtccgggcagcgtaggcgggcgactcagatcccagccagtggacttagcccctgtttgctcctccgataactggggtgaccttggttaatattcaccagcagcctcccccgttgcccctctggatccactgcttaaatacggacgaggacagggccctgtctcctcagcttcaggcaccaccactgacctgggacagtgaatcgacaatgccgtcttctgtctcgtggggcatcctcctgctggcaggcctgtgctgcctggtccctgtctccctggctgaggatccccagggagatgctgcccagaagacagatacatcccaccatgatcaggatcacccaaccttcaacaagatcacccccaacctggctgagttcgccttcagcctataccgccagctggcacaccagtccaacagcaccaatatcttcttctccccagtgagcatcgctacagcctttgcaatgctctccctggggaccaaggctgacactcacgatgaaatcctggagggcctgaatttcaacctcacggagattccggaggctcagatccatgaaggcttccaggaactcctccgtaccctcaaccagccagacagccagctccagctgaccaccggcaatggcctgttcctcagcgagggcctgaagctagtggataagtttttggaggatgttaaaaagttgtaccactcagaagccttcactgtcaacttcggggacaccgaagaggccaagaaacagatcaacgattacgtggagaagggtactcaagggaaaattgtggatttggtcaaggagcttgacagagacacagtttttgctctggtgaattacatcttctttaaaggcaaatgggagagaccctttgaagtcaaggacaccgaggaagaggacttccacgtggaccaggtgaccaccgtgaaggtgcctatgatgaagcgtttaggcatgtttaacatccagcactgtaagaagctgtccagctgggtgctgctgatgaaatacctgggcaatgccaccgccatcttcttcctgcctgatgaggggaaactacagcacctggaaaatgaactcacccacgatatcatcaccaagttcctggaaaatgaagacagaaggtctgccagcttacatttacccaaactgtccattactggaacctatgatctgaagagcgtcctgggtcaactgggcatcactaaggtcttcagcaatggggctgacctctccggggtcacagaggaggcacccctgaagctctccaaggccgtgcataaggctgtgctgaccatcgacgagaaagggactgaagctgctggggccatgtttttagaggccatacccatgtctatcccccccgaggtcaagttcaacaaaccctttgtcttcttaatgattgaacaaaataccaagtctcccctcttcatgggaaaagtggtgaatcccacccaaaaataactgcctctcgctcctcaacccctcccctccatccctggccccctccctggatgacattaaagaagggttgagctggtccctgcctgcatgtgactgtaaatccctcccatgttttctctgagtctccctttgcctgctgaggctgtatgtgggctccaggtaacagtgctgtcttcgggccccctgaactgtgttcatggagcatctggctgggtaggcacatgctgggcttgaatccaggggggactgaatcctcagcttacggacctgggcccatctgtttctggagggctccagtcttccttgtcctgtcttggagtccccaagaaggaatcacaggggaggaaccagataccagccatgaccccaggctccaccaagcatcttcatgtccccctgctcatcccccactcccccccacccagagttgctcatcctgccagggctggctgtgcccaccccaaggctgccctcctgggggccccagaactgcctgatcgtgccgtggcccagttttgtggcatctgcagcaacacaagagagaggacaatgtcctcctcttgacccgctgtcacctaaccagactcgggccctgcacctctcaggcacttctggaaaatgactgaggcagattcttcctgaagcccattctccatggggcaacaaggacacctattctgtccttgtccttccatcgctgccccagaaagcctcacatatctccgtttagaatcaggtcccttctccccagatgaagaggagggtctctgctttgttttctctatctcctcctcagacttgaccaggcccagcaggccccagaagaccattaccctatatcccttctcctccctagtcacatggccataggcctgctgatggctcaggaaggccattgcaaggactcctcagctatgggagaggaagcacatcacccattgacccccgcaacccctccctttcctcctctgagtcccgactggggccacatgcagcctgacttctttgtgcctgttgctgtccctgcagtcttcagagggccaccgcagctccagtgccacggcaggaggctgttcctgaatagcccctgtggtaagggccaggagagtccttccatcctccaaggccctgctaaaggacacagcagccaggaagtcccctgggcccctagctgaaggacagcctgctccctccgtctctaccaggaatggccttgtcctatggaaggcactgccccatcccaaactaatctaggaatcactgtctaaccactcactgtcatgaatgtgtacttaaaggatgaggttgagtcataccaaatagtgatttcgatagttcaaaatggtgaaattagcaattctacatgattcagtctaatcaatggataccgactgtttcccacacaagtctcctgttctcttaagcttactcactgacagcctttcactctccacaaatacattaaagatatggccatcaccaagccccctaggatgacaccagacctgagagtctgaagacctggatccaagttctgacttttccccctgacagctgtgtgaccttcgtgaagtcgccaaacctctctgagccccagtcattgctagtaagacctgcctttgagttggtatgatgttcaagttagataacaaaatgtttatacccattagaacagagaataaatagaactacatttcttgca

SEQ ID NO: 125 - DNA, 3198 bp, Homo sapiens
  gene (1)..(3198): Accession No. NM_000602
aggagcacagctgtgtttggctgcagggccaagagcgctgtcaagaagacccacacgcccccctccagcagctgaattcctgcagctcagcagccgccgccagagcaggacgaaccgccaatcgcaaggcacctctgagaacttcaggatgcagatgtctccagccctcacctgcctagtcctgggcctggcccttgtctttggtgaagggtctgctgtgcaccatcccccatcctacgtggcccacctggcctcagacttcggggtgagggtgtttcagcaggtggcgcaggcctccaaggaccgcaacgtggttttctcaccctatggggtggcctcggtgttggccatgctccagctgacaacaggaggagaaacccagcagcagattcaagcagctatgggattcaagattgatgacaagggcatggcccccgccctccggcatctgtacaaggagctcatggggccatggaacaaggatgagatcagcaccacagacgcgatcttcgtccagcgggatctgaagctggtccagggcttcatgccccacttcttcaggctgttccggagcacggtcaagcaagtggacttttcagaggtggagagagccagattcatcatcaatgactgggtgaagacacacacaaaaggtatgatcagcaacttgcttgggaaaggagccgtggaccagctgacacggctggtgctggtgaatgccctctacttcaacggccagtggaagactcccttccccgactccagcacccaccgccgcctcttccacaaatcagacggcagcactgtctctgtgcccatgatggctcagaccaacaagttcaactatactgagttcaccacgcccgatggccattactacgacatcctggaactgccctaccacggggacaccctcagcatgttcattgctgccccttatgaaaaagaggtgcctctctctgccctcaccaacattctgagtgcccagctcatcagccactggaaaggcaacatgaccaggctgccccgcctcctggttctgcccaagttctccctggagactgaagtcgacctcaggaagcccctagagaacctgggaatgaccgacatgttcagacagtttcaggctgacttcacgagtctttcagaccaagagcctctccacgtcgcgcaggcgctgcagaaagtgaagatcgaggtgaacgagagtggcacggtggcctcctcatccacagctgtcatagtctcagcccgcatggcccccgaggagatcatcatggacagacccttcctctttgtggtccggcacaaccccacaggaacagtccttttcatgggccaagtgatggaaccctgaccctggggaaagacgccttcatctgggacaaaactggagatgcatcgggaaagaagaaactccgaagaaaagaattttagtgttaatgactctttctgaaggaagagaagacatttgccttttgttaaaagatggtaaaccagatctgtctccaagaccttggcctctccttggaggacctttaggtcaaactccctagtctccacctgagaccctgggagagaagtttgaagcacaactcccttaaggtctccaaaccagacggtgacgcctgcgggaccatctggggcacctgcttccacccgtctctctgcccactcgggtctgcagacctggttcccactgaggccctttgcaggatggaactacggggcttacaggagcttttgtgtgcctggtagaaactatttctgttccagtcacattgccatcactcttgtactgcctgccaccgcggaggaggctggtgacaggccaaaggccagtggaagaaacaccctttcatctcagagtccactgtggcactggccacccctccccagtacaggggtgctgcaggtggcagagtgaatgtcccccatcatgtggcccaactctcctggcctggccatctccctccccagaaacagtgtgcatgggttattttggagtgtaggtgacttgtttactcattgaagcagatttctgcttccttttatttttataggaatagaggaagaaatgtcagatgcgtgcccagctcttcaccccccaatctcttggtggggaggggtgtacctaaatatttatcatatccttgcccttgagtgcttgttagagagaaagagaactactaaggaaaataatattatttaaactcgctcctagtgtttctttgtggtctgtgtcaccgtatctcaggaagtccagccacttgactggcacacacccctccggacatccagcgtgacggagcccacactgccaccttgtggccgcctgagaccctcgcgccccccgcgcccctctttttccccttgatggaaattgaccatacaatttcatcctccttcaggggatcaaaaggacggagtggggggacagagactcagatgaggacagagtggtttccaatgtgttcaatagatttaggagcagaaatgcaaggggctgcatgacctaccaggacagaactttccccaattacagggtgactcacagccgcattggtgactcacttcaatgtgtcatttccggctgctgtgtgtgagcagtggacacgtgaggggggggtgggtgagagagacaggcagctcggattcaactaccttagataatatttctgaaaacctaccagccagagggtagggcacaaagatggatgtaatgcactttgggaggccaaggcgggaggattgcttgagcccaggagttcaagaccagcctgggcaacataccaagacccccgtctctttaaaaatatatatattttaaatatacttaaatatatatttctaatatctttaaatatatatatatattttaaagaccaatttatgggagaattgcacacagatgtgaaatgaatgtaatctaatagaagcctaatcagcccaccatgttctccactgaaaaatcctctttctttggggtttttctttctttcttttttgattttgcactggacggtgacgtcagccatgtacaggatccacaggggtggtgtcaaatgctattgaaattgtgttgaattgtatgctttttcacttttgataaataaacatgtaaaaatgtttcaaaaaaataataaaataaataaatacgaagaatatgtcaggacagtcaaaaaaaaaaaaaaaaaa

SEQ ID NO: 126 - DNA, 2746 bp, Homo sapiens
  gene (1)..(2746): Accession No. NM_003955
ggctccgacttggactccctgctccgctgctgccgcttcggccccgcacgcagccagccgccagccgcccgcccggcccagctcccgccgcggccccttgccgcggtccctctcctggtcccctcccggttggtccgggggtgcgcagggggcagggcgggcgcccaggggaagctcgagggacgcgcgcgcgaaggctcctttgtggacttcacggccgccaacatctgggcgcagcgcgggccaccgctggccgtctcgccgccgcgtcgccttggggacccgagggggctcagccccaaggacggagacttcgattcgggaccagccccccgggatgcggtagcggccgctgtgcggaggccgcgaagcagctgcagccgccgccgcgcagatccacgctggctccgtgcgccatggtcacccacagcaagtttcccgccgccgggatgagccgccccctggacaccagcctgcgcctcaagaccttcagctccaagagcgagtaccagctggtggtgaacgcagtgcgcaagctgcaggagagcggcttctactggagcgcagtgaccggcggcgaggcgaacctgctgctcagtgccgagcccgccggcacctttctgatccgcgacagctcggaccagcgccacttcttcacgctcagcgtcaagacccagtctgggaccaagaacctgcgcatccagtgtgaggggggcagcttctctctgcagagcgatccccggagcacgcagcccgtgccccgcttcgactgcgtgctcaagctggtgcaccactacatgccgccccctggagccccctccttcccctcgccacctactgaaccctcctccgaggtgcccgagcagccgtctgcccagccactccctgggagtccccccagaagagcctattacatctactccgggggcgagaagatccccctggtgttgagccggcccctctcctccaacgtggccactcttcagcatctctgtcggaagaccgtcaacggccacctggactcctatgagaaagtcacccagctgccggggcccattcgggagttcctggaccagtacgatgccccgctttaaggggtaaagggcgcaaagggcatgggtcgggagaggggacgcaggcccctctcctccgtggcacatggcacaagcacaagaagccaaccaggagagagtcctgtagctctggggggaaagagggcggacaggcccctccctctgccctctccctgcagaatgtggcaggcggacctggaatgtgttggagggaagggggagtaccacctgagtctccagcttctccggaggagccagctgtcctggtgggacgatagcaaccacaagtggattctccttcaattcctcagcttcccctctgcctccaaacaggggacacttcgggaatgctgaactaatgagaactgccagggaatcttcaaactttccaacggaacttgtttgctctttgatttggtttaaacctgagctggttgtggagcctgggaaaggtggaagagagagaggtcctgagggccccagggctgcgggctggcgaaggaaatggtcacaccccccgcccaccccaggcgaggatcctggtgacatgctcctctccctggctccggggagaagggcttggggtgacctgaagggaaccatcctggtaccccacatcctctcctccgggacagtcaccgaaaacacaggttccaaagtctacctggtgcctgagagcccagggcccttcctccgttttaagggggaagcaacatttggaggggatggatgggctggtcagctggtctccttttcctactcatactataccttcctgtacctgggtggatggagcgggaggatggaggagacgggacatctttcacctcaggctcctggtagagaagacaggggattctactctgtgcctcctgactatgtctggctaagagattcgccttaaatgctccctgtcccatggagagggacccagcataggaaagccacatactcagcctggatgggtggagaggctgagggactcactggagggcaccaagccagcccacagccagggaagtggggagggggggcggaaacccatgcctcccagctgagcactgggaatgtcagcccagtaagtattggccagtcaggcgcctcgtggtcagagcagagccaccaggtcccactgccccgagccctgcacagccctccctcctgcctgggtgggggaggctggaggtcattggagaggctggactgctgccaccccgggtgctcccgctctgccatagcactgatcagtgacaatttacaggaatgtagcagcgatggaattacctggaacagttttttgtttttgtttttgtttttgtttttgtgggggggggcaactaaacaaacacaaagtattctgtgtcaggtattgggctggacagggcagttgtgtgttggggtggtttttttctctatttttttgtttgtttcttgttttttaataatgtttacaatctgcctcaatcactctgtcttttataaagattccacctccagtcctctctcctcccccctactcaggcccttgaggctattaggagatgcttgaagaactcaacaaaatcccaatccaagtcaaactttgcacatatttatatttatattcagaaaagaaacatttcagtaatttataataaagagcactattttttaatgaaaaaaaaaaaaaaaaa

SEQ ID NO: 127 - DNA, 2217 bp, Homo sapiens
  gene (1)..(2217): Accession No. NM_000660
ccccgccgccgccgcccttcgcgccctgggccatctccctcccacctccctccgcggagcagccagacagcgagggccccggccgggggcaggggggacgccccgtccggggcacccccccggctctgagccgcccgcggggccggcctcggcccggagcggaggaaggagtcgccgaggagcagcctgaggccccagagtctgagacgagccgccgccgcccccgccactgcggggaggagggggaggaggagcgggaggagggacgagctggtcgggagaagaggaaaaaaacttttgagacttttccgttgccgctgggagccggaggcgcggggacctcttggcgcgacgctgccccgcgaggaggcaggacttggggaccccagaccgcctccctttgccgccggggacgcttgctccctccctgccccctacacggcgtccctcaggcgcccccattccggaccagccctcgggagtcgccgacccggcctcccgcaaagacttttccccagacctcgggcgcaccccctgcacgccgccttcatccccggcctgtctcctgagcccccgcgcatcctagaccctttctcctccaggagacggatctctctccgacctgccacagatcccctattcaagaccacccaccttctggtaccagatcgcgcccatctaggttatttccgtgggatactgagacacccccggtccaagcctcccctccaccactgcgcccttctccctgaggacctcagctttccctcgaggccctcctaccttttgccgggagacccccagcccctgcaggggcggggcctccccaccacaccagccctgttcgcgctctcggcagtgccggggggcgccgcctcccccatgccgccctccgggctgcggctgctgccgctgctgctaccgctgctgtggctactggtgctgacgcctggccggccggccgcgggactatccacctgcaagactatcgacatggagctggtgaagcggaagcgcatcgaggccatccgcggccagatcctgtccaagctgcggctcgccagccccccgagccagggggaggtgccgcccggcccgctgcccgaggccgtgctcgccctgtacaacagcacccgcgaccgggtggccggggagagtgcagaaccggagcccgagcctgaggccgactactacgccaaggaggtcacccgcgtgctaatggtggaaacccacaacgaaatctatgacaagttcaagcagagtacacacagcatatatatgttcttcaacacatcagagctccgagaagcggtacctgaacccgtgttgctctcccgggcagagctgcgtctgctgaggctcaagttaaaagtggagcagcacgtggagctgtaccagaaatacagcaacaattcctggcgatacctcagcaaccggctgctggcacccagcgactcgccagagtggttatcttttgatgtcaccggagttgtgcggcagtggttgagccgtggaggggaaattgagggctttcgccttagcgcccactgctcctgtgacagcagggataacacactgcaagtggacatcaacgggttcactaccggccgccgaggtgacctggccaccattcatggcatgaaccggcctttcctgcttctcatggccaccccgctggagagggcccagcatctgcaaagctcccggcaccgccgagccctggacaccaactattgcttcagctccacggagaagaactgctgcgtgcggcagctgtacattgacttccgcaaggacctcggctggaagtggatccacgagcccaagggctaccatgccaacttctgcctcgggccctgcccctacatttggagcctggacacgcagtacagcaaggtcctggccctgtacaaccagcataacccgggcgcctcggcggcgccgtgctgcgtgccgcaggcgctggagccgctgcccatcgtgtactacgtgggccgcaagcccaaggtggagcagctgtccaacatgatcgtgcgctcctgcaagtgcagctgaggtcccgccccgccccgccccgccccggcaggcccggccccaccccgccccgcccccgctgccttgcccatgggggctgtatttaaggacacccgtgccccaagcccacctggggccccattaaagatggagagaggactgcggaaaaaaaaaaaaaaaaaa

SEQ ID NO: 128 - DNA, 931 bp, Homo sapiens
  gene (1)..(931): Accession No. NM_003254
tttcgtcggcccgccccttggcttctgcactgatggtgggtggatgagtaatgcatccaggaagcctggaggcctgtggtttccgcacccgctgccacccccgcccctagcgtggacatttatcctctagcgctcaggccctgccgccatcgccgcagatccagcgcccagagagacaccagagaacccaccatggccccctttgagcccctggcttctggcatcctgttgttgctgtggctgatagcccccagcagggcctgcacctgtgtcccaccccacccacagacggccttctgcaattccgacctcgtcatcagggccaagttcgtggggacaccagaagtcaaccagaccaccttataccagcgttatgagatcaagatgaccaagatgtataaagggttccaagccttaggggatgccgctgacatccggttcgtctacacccccgccatggagagtgtctgcggatacttccacaggtcccacaaccgcagcgaggagtttctcattgctggaaaactgcaggatggactcttgcacatcactacctgcagttttgtggctccctggaacagcctgagcttagctcagcgccggggcttcaccaagacctacactgttggctgtgaggaatgcacagtgtttccctgtttatccatcccctgcaaactgcagagtggcactcattgcttgtggacggaccagctcctccaaggctctgaaaagggcttccagtcccgtcaccttgcctgcctgcctcgggagccagggctgtgcacctggcagtccctgcggtcccagatagcctgaatcctgcccggagtggaagctgaagcctgcacagtgtccaccctgttcccactcccatctttcttccggacaatgaaataaagagttaccacccagcagaaaaaaaaaaaaaaaa

SEQ ID NO: 129 - DNA, 3417 bp, Homo sapiens
  gene (1)..(3417): Accession No. NM_003264
cggaggcagcgagaaagcgcagccaggcggctgctcggcgttctctcaggtgactgctcggagttctcccagtgtttggtgttgcaagcaggatccaaaggagacctatagtgactcccaggagctcttagtgaccaagtgaaggtacctgtggggctcattgtgcccattgctctttcactgctttcaactggtagttgtgggttgaagcactggacaatgccacatactttgtggatggtgtgggtcttgggggtcatcatcagcctctccaaggaagaatcctccaatcaggcttctctgtcttgtgaccgcaatggtatctgcaagggcagctcaggatctttaaactccattccctcagggctcacagaagctgtaaaaagccttgacctgtccaacaacaggatcacctacattagcaacagtgacctacagaggtgtgtgaacctccaggctctggtgctgacatccaatggaattaacacaatagaggaagattctttttcttccctgggcagtcttgaacatttagacttatcctataattacttatctaatttatcgtcttcctggttcaagcccctttcttctttaacattcttaaacttactgggaaatccttacaaaaccctaggggaaacatctcttttttctcatctcacaaaattgcaaatcctgagagtgggaaatatggacaccttcactaagattcaaagaaaagattttgctggacttaccttccttgaggaacttgagattgatgcttcagatctacagagctatgagccaaaaagtttgaagtcaattcagaatgtaagtcatctgatccttcatatgaagcagcatattttactgctggagatttttgtagatgttacaagttccgtggaatgtttggaactgcgagatactgatttggacactttccatttttcagaactatccactggtgaaacaaattcattgattaaaaagtttacatttagaaatgtgaaaatcaccgatgaaagtttgtttcaggttatgaaacttttgaatcagatttctggattgttagaattagagtttgatgactgtacccttaatggagttggtaattttagagcatctgataatgacagagttatagatccaggtaaagtggaaacgttaacaatccggaggctgcatattccaaggttttacttattttatgatctgagcactttatattcacttacagaaagagttaaaagaatcacagtagaaaacagtaaagtttttctggttccttgtttactttcacaacatttaaaatcattagaatacttggatctcagtgaaaatttgatggttgaagaatacttgaaaaattcagcctgtgaggatgcctggccctctctacaaactttaattttaaggcaaaatcatttggcatcattggaaaaaaccggagagactttgctcactctgaaaaacttgactaacattgatatcagtaagaatagttttcattctatgcctgaaacttgtcagtggccagaaaagatgaaatatttgaacttatccagcacacgaatacacagtgtaacaggctgcattcccaagacactggaaattttagatgttagcaacaacaatctcaatttattttctttgaatttgccgcaactcaaagaactttatatttccagaaataagttgatgactctaccagatgcctccctcttacccatgttactagtattgaaaatcagtaggaatgcaataactacgttttctaaggagcaacttgactcatttcacacactgaagactttggaagctggtggcaataacttcatttgctcctgtgaattcctctccttcactcaggagcagcaagcactggccaaagtcttgattgattggccagcaaattacctgtgtgactctccatcccatgtgcgtggccagcaggttcaggatgtccgcctctcggtgtcggaatgtcacaggacagcactggtgtctggcatgtgctgtgctctgttcctgctgatcctgctcacgggggtcctgtgccaccgtttccatggcctgtggtatatgaaaatgatgtgggcctggctccaggccaaaaggaagcccaggaaagctcccagcaggaacatctgctatgatgcatttgtttcttacagtgagcgggatgcctactgggtggagaaccttatggtccaggagctggagaacttcaatccccccttcaagttgtgtcttcataagcgggacttcattcctggcaagtggatcattgacaatatcattgactccattgaaaagagccacaaaactgtctttgtgctttctgaaaactttgtgaagagtgagtggtgcaagtatgaactggacttctcccatttccgtctttttgatgagaacaatgatgctgccattctcattcttctggagcccattgagaaaaaagccattccccagcgcttctgcaagctgcggaagataatgaacaccaagacctacctggagtggcccatggacgaggctcagcgggaaggattttgggtaaatctgagagctgcgataaagtcctaggttcccatatttaagaccagtctttgtctagttgggatctttatgtcactagttatagttaagttcattcagacataattatataaaaactacgtggatgtaccgtcatttgaggacttgcttactaaaactacaaaacttcaaattttgtctggggtgctgttttataaacatatgccagatttaaaaattggtttttggtttttcttttttctatgagataaccatgatcataagtctattactgatatctgaatatagtcccttggtatccaagggaattggttgcaggatcctcgtggatatcaaaattcatagatgatcaagtcccttataagagtggcatagtatttgcatataacctgtgtacattctcctgtatactttaaatcatctctagattacttatgatacccaatacaatgtaaatactatgtaaatagttgtactgtctttttatttatattattattgttattttttattttcaaaatttttaaaacatacttttgatccacagttggttgacttcatggatgcagaacccatggatatagagggccaactgtaatctgtagcaactggcttagttcattaggaaacagcacaaatgaacttaagattctcaatgactgtgtcattctttcttcctgctaagagactcctctgtggccacaaaaggcattctctgtcctacctagctgtcacttctctgtgcagctgatctcaagagcaacaaggcaaagtatttggggcactccccaaaacttgttgctattcctagaaaaaagtgctgtgtatttcctattaaactttacaggatgagaaaaaaaaaaaaaaaaa

SEQ ID NO: 130 - DNA, 3934 bp, Homo sapiens
  gene (1)..(3934): Accession No. NM_003266
cctctcaccctttagcccagaactgctttgaatacaccaattgctgtggggcggctcgaggaagagaagacaccagtgcctcagaaactgctcggtcagacggtgatagcgagccacgcattcacagggccactgctgctcacagaagcagtgaggatgatgccaggatgatgtctgcctcgcgcctggctgggactctgatcccagccatggccttcctctcctgcgtgagaccagaaagctgggagccctgcgtggagacttggccctaaaccacacagaagagctggcatgaaacccagagctttcagactccggagcctcagcccttcaccccgattccattgcttcttgctaaatgctgccgttttatcacggaggtggttcctaatattacttatcaatgcatggagctgaatttctacaaaatccccgacaacctccccttctcaaccaagaacctggacctgagctttaatcccctgaggcatttaggcagctatagcttcttcagtttcccagaactgcaggtgctggatttatccaggtgtgaaatccagacaattgaagatggggcatatcagagcctaagccacctctctaccttaatattgacaggaaaccccatccagagtttagccctgggagccttttctggactatcaagtttacagaagctggtggctgtggagacaaatctagcatctctagagaacttccccattggacatctcaaaactttgaaagaacttaatgtggctcacaatcttatccaatctttcaaattacctgagtatttttctaatctgaccaatctagagcacttggacctttccagcaacaagattcaaagtatttattgcacagacttgcgggttctacatcaaatgcccctactcaatctctctttagacctgtccctgaaccctatgaactttatccaaccaggtgcatttaaagaaattaggcttcataagctgactttaagaaataattttgatagtttaaatgtaatgaaaacttgtattcaaggtctggctggtttagaagtccatcgtttggttctgggagaatttagaaatgaaggaaacttggaaaagtttgacaaatctgctctagagggcctgtgcaatttgaccattgaagaattccgattagcatacttagactactacctcgatgatattattgacttatttaattgtttgacaaatgtttcttcattttccctggtgagtgtgactattgaaagggtaaaagacttttcttataatttcggatggcaacatttagaattagttaactgtaaatttggacagtttcccacattgaaactcaaatctctcaaaaggcttactttcacttccaacaaaggtgggaatgctttttcagaagttgatctaccaagccttgagtttctagatctcagtagaaatggcttgagtttcaaaggttgctgttctcaaagtgattttgggacaaccagcctaaagtatttagatctgagcttcaatggtgttattaccatgagttcaaacttcttgggcttagaacaactagaacatctggatttccagcattccaatttgaaacaaatgagtgagttttcagtattcctatcactcagaaacctcatttaccttgacatttctcatactcacaccagagttgctttcaatggcatcttcaatggcttgtccagtctcgaagtcttgaaaatggctggcaattctttccaggaaaacttccttccagatatcttcacagagctgagaaacttgaccttcctggacctctctcagtgtcaactggagcagttgtctccaacagcatttaactcactctccagtcttcaggtactaaatatgagccacaacaacttcttttcattggatacgtttccttataagtgtctgaactccctccaggttcttgattacagtctcaatcacataatgacttccaaaaaacaggaactacagcattttccaagtagtctagctttcttaaatcttactcagaatgactttgcttgtacttgtgaacaccagagtttcctgcaatggatcaaggaccagaggcagctcttggtggaagttgaacgaatggaatgtgcaacaccttcagataagcagggcatgcctgtgctgagtttgaatatcacctgtcagatgaataagaccatcattggtgtgtcggtcctcagtgtgcttgtagtatctgttgtagcagttctggtctataagttctattttcacctgatgcttcttgctggctgcataaagtatggtagaggtgaaaacatctatgatgcctttgttatctactcaagccaggatgaggactgggtaaggaatgagctagtaaagaatttagaagaaggggtgcctccatttcagctctgccttcactacagagactttattcccggtgtggccattgctgccaacatcatccatgaaggtttccataaaagccgaaaggtgattgttgtggtgtcccagcacttcatccagagccgctggtgtatctttgaatatgagattgctcagacctggcagtttctgagcagtcgtgctggtatcatcttcattgtcctgcagaaggtggagaagaccctgctcaggcagcaggtggagctgtaccgccttctcagcaggaacacttacctggagtgggaggacagtgtcctggggcggcacatcttctggagacgactcagaaaagccctgctggatggtaaatcatggaatccagaaggaacagtgggtacaggatgcaattggcaggaagcaacatctatctgaagaggaaaaataaaaacctcctgaggcatttcttgcccagctgggtccaacacttgttcagttaataagtattaaatgctgccacatgtcaggccttatgctaagggtgagtaattccatggtgcactagatatgcagggctgctaatctcaaggagcttccagtgcagagggaataaatgctagactaaaatacagagtcttccaggtgggcatttcaaccaactcagtcaaggaacccatgacaaagaaagtcatttcaactcttacctcatcaagttgaataaagacagagaaaacagaaagagacattgttcttttcctgagtcttttgaatggaaattgtattatgttatagccatcataaaaccattttggtagttttgactgaactgggtgttcactttttcctttttgattgaatacaatttaaattctacttgatgactgcagtcgtcaaggggctcctgatgcaagatgccccttccattttaagtctgtctccttacagaggttaaagtctagtggctaattcctaaggaaacctgattaacacatgctcacaaccatcctggtcattctcgagcatgttctattttttaactaatcacccctgatatatttttatttttatatatccagttttcatttttttacgtcttgcctataagctaatatcataaataaggttgtttaagacgtgcttcaaatatccatattaaccactatttttcaaggaagtatggaaaagtacactctgtcactttgtcactcgatgtcattccaaagttattgcctactaagtaatgactgtcatgaaagcagcattgaaataatttgtttaaagggggcactcttttaaacgggaagaaaatttccgcttcctggtcttatcatggacaatttgggctagaggcaggaaggaagtgggatgacctcaggaggtcaccttttcttgattccagaaacatatgggctgataaacccggggtgacctcatgaaatgagttgcagcagaagtttatttttttcagaacaagtgatgtttgatggacctctgaatctctttagggagacacagatggctgggatccctcccctgtacccttctcactgccaggagaacta

SEQ ID NO: 131 - DNA, 1377 bp, Homo sapiens
  gene (1)..(1377): Accession No. NM_012452
agcatcctgagtaatgagtggcctgggccggagcaggcgaggtggccggagccgtgtggaccaggaggagcgctttccacagggcctgtggacgggggtggctatgagatcctgccccgaagagcagtactgggatcctctgctgggtacctgcatgtcctgcaaaaccatttgcaaccatcagagccagcgcacctgtgcagccttctgcaggtcactcagctgccgcaaggagcaaggcaagttctatgaccatctcctgagggactgcatcagctgtgcctccatctgtggacagcaccctaagcaatgtgcatacttctgtgagaacaagctcaggagcccagtgaaccttccaccagagctcaggagacagcggagtggagaagttgaaaacaattcagacaactcgggaaggtaccaaggattggagcacagaggctcagaagcaagtccagctctcccggggctgaagctgagtgcagatcaggtggccctggtctacagcacgctggggctctgcctgtgtgccgtcctctgctgcttcctggtggcggtggcctgcttcctcaagaagaggggggatccctgctcctgccagccccgctcaaggccccgtcaaagtccggccaagtcttcccaggatcacgcgatggaagccggcagccctgtgagcacatcccccgagccagtggagacctgcagcttctgcttccctgagtgcagggcgcccacgcaggagagcgcagtcacgcctgggacccccgaccccacttgtgctggaaggtgggggtgccacaccaggaccacagtcctgcagccttgcccacacatcccagacagtggccttggcattgtgtgtgtgcctgcccaggaggggggcccaggtgcataaatgggggtcagggagggaaaggaggagggagagagatggagaggaggggagagagaaagagaggtggggagaggggagagagatatgaggagagagagacagaggaggcagagagggagagaaacagaggagacagagagggagagagagacagagggagagagagacagaggggaagagaggcagagagggaaagaggcagagaaggaaagagacaggcagagaaggagagaggcagagagggagagaggcagagagggagagaggcagagagacagagagggagagagggacagagagagatagagcaggaggtcggggcactctgagtcccagttcccagtgcagctgtaggtcgtcatcacctaaccacacgtgcaataaagtcctcgtgcctgctgctcacagcccccgagagcccctcctcctggagaataaaacctttggcagctgcccttcctcaaaaaaaaaaaaaaaaaaaa

SEQ ID NO: 132 - DNA, 2236 bp, Homo sapiens
  gene (1)..(2236): Accession No. NM_001065
gctgttgcaacactgcctcactcttcccctcccaccttctctcccctcctctctgctttaattttctcagaattctctggactgaggctccagttctggcctttggggttcaagatcactgggaccaggccgtgatctctatgcccgagtctcaaccctcaactgtcaccccaaggcacttgggacgtcctggacagaccgagtcccgggaagccccagcactgccgctgccacactgccctgagcccaaatgggggagtgagaggccatagctgtctggcatgggcctctccaccgtgcctgacctgctgctgccactggtgctcctggagctgttggtgggaatatacccctcaggggttattggactggtccctcacctaggggacagggagaagagagatagtgtgtgtccccaaggaaaatatatccaccctcaaaataattcgatttgctgtaccaagtgccacaaaggaacctacttgtacaatgactgtccaggcccggggcaggatacggactgcagggagtgtgagagcggctccttcaccgcttcagaaaaccacctcagacactgcctcagctgctccaaatgccgaaaggaaatgggtcaggtggagatctcttcttgcacagtggaccgggacaccgtgtgtggctgcaggaagaaccagtaccggcattattggagtgaaaaccttttccagtgcttcaattgcagcctctgcctcaatgggaccgtgcacctctcctgccaggagaaacagaacaccgtgtgcacctgccatgcaggtttctttctaagagaaaacgagtgtgtctcctgtagtaactgtaagaaaagcctggagtgcacgaagttgtgcctaccccagattgagaatgttaagggcactgaggactcaggcaccacagtgctgttgcccctggtcattttctttggtctttgccttttatccctcctcttcattggtttaatgtatcgctaccaacggtggaagtccaagctctactccattgtttgtgggaaatcgacacctgaaaaagagggggagcttgaaggaactactactaagcccctggccccaaacccaagcttcagtcccactccaggcttcacccccaccctgggcttcagtcccgtgcccagttccaccttcacctccagctccacctatacccccggtgactgtcccaactttgcggctccccgcagagaggtggcaccaccctatcagggggctgaccccatccttgcgacagccctcgcctccgaccccatccccaacccccttcagaagtgggaggacagcgcccacaagccacagagcctagacactgatgaccccgcgacgctgtacgccgtggtggagaacgtgcccccgttgcgctggaaggaattcgtgcggcgcctagggctgagcgaccacgagatcgatcggctggagctgcagaacgggcgctgcctgcgcgaggcgcaatacagcatgctggcgacctggaggcggcgcacgccgcggcgcgaggccacgctggagctgctgggacgcgtgctccgcgacatggacctgctgggctgcctggaggacatcgaggaggcgctttgcggccccgccgccctcccgcccgcgcccagtcttctcagatgaggctgcgcccctgcgggcagctctaaggaccgtcctgcgagatcgccttccaaccccacttttttctggaaaggaggggtcctgcaggggcaagcaggagctagcagccgcctacttggtgctaacccctcgatgtacatagcttttctcagctgcctgcgcgccgccgacagtcagcgctgtgcgcgcggagagaggtgcgccgtgggctcaagagcctgagtgggtggtttgcgaggatgagggacgctatgcctcatgcccgttttgggtgtcctcaccagcaaggctgctcgggggcccctggttcgtccctgagcctttttcacagtgcataagcagttttttttgtttttgttttgttttgttttgtttttaaatcaatcatgttacactaatagaaacttggcactcctgtgccctctgcctggacaagcacatagcaagctgaactgtcctaaggcaggggcgagcacggaacaatggggccttcagctggagctgtggacttttgtacatacactaaaattctgaagttaaagctctgctcttggaaaaaaaaaaaaaaaaaaaaaaaaaaaaaaaaa

SEQ ID NO: 133 - DNA, 1834 bp, Homo sapiens
  gene (1)..(1834): Accession No. NM_000074
actttgacagtcttctcatgctgcctctgccaccttctctgccagaagataccatttcaactttaacacagcatgatcgaaacatacaaccaaacttctccccgatctgcggccactggactgcccatcagcatgaaaatttttatgtatttacttactgtttttcttatcacccagatgattgggtcagcactttttgctgtgtatcttcatagaaggttggacaagatagaagatgaaaggaatcttcatgaagattttgtattcatgaaaacgatacagagatgcaacacaggagaaagatccttatccttactgaactgtgaggagattaaaagccagtttgaaggctttgtgaaggatataatgttaaacaaagaggagacgaagaaagaaaacagctttgaaatgcaaaaaggtgatcagaatcctcaaattgcggcacatgtcataagtgaggccagcagtaaaacaacatctgtgttacagtgggctgaaaaaggatactacaccatgagcaacaacttggtaaccctggaaaatgggaaacagctgaccgttaaaagacaaggactctattatatctatgcccaagtcaccttctgttccaatcgggaagcttcgagtcaagctccatttatagccagcctctgcctaaagtcccccggtagattcgagagaatcttactcagagctgcaaatacccacagttccgccaaaccttgcgggcaacaatccattcacttgggaggagtatttgaattgcaaccaggtgcttcggtgtttgtcaatgtgactgatccaagccaagtgagccatggcactggcttcacgtcctttggcttactcaaactctgaacagtgtcaccttgcaggctgtggtggagctgacgctgggagtcttcataatacagcacagcggttaagcccaccccctgttaactgcctatttataaccctaggatcctccttatggagaactatttattatacactccaaggcatgtagaactgtaataagtgaattacaggtcacatgaaaccaaaacgggccctgctccataagagcttatatatctgaagcagcaaccccactgatgcagacatccagagagtcctatgaaaagacaaggccattatgcacaggttgaattctgagtaaacagcagataacttgccaagttcagttttgtttctttgcgtgcagtgtctttccatggataatgcatttgatttatcagtgaagatgcagaagggaaatggggagcctcagctcacattcagttatggttgactctgggttcctatggccttgttggagggggccaggctctagaacgtctaacacagtggagaaccgaaaccccccccccccccccgccaccctctcggacagttattcattctctttcaatctctctctctccatctctctctttcagtctctctctctcaacctctttcttccaatctctctttctcaatctctctgtttccctttgtcagtctcttccctcccccagtctctcttctcaatccccctttctaacacacacacacacacacacacacacacacacacacacacacacacacacacagagtcaggccgttgctagtcagttctcttctttccaccctgtccctatctctaccactatagatgagggtgaggagtagggagtgcagccctgagcctgcccactcctcattacgaaatgactgtatttaaaggaaatctattgtatctacctgcagtctccattgtttccagagtgaacttgtaattatcttgttatttattttttgaataataaagacctcttaacattaa

SEQ ID NO: 134 - DNA, 1909 bp, Homo sapiens
  gene (1)..(1909): Accession No. NM_000639
gaggtgtttcccttagctatggaaactctataagagagatccagcttgcctcctcttgagcagtcagcaacagggtcccgtccttgacacctcagcctctacaggactgagaagaagtaaaaccgtttgctggggctggcctgactcaccagctgccatgcagcagcccttcaattacccatatccccagatctactgggtggacagcagtgccagctctccctgggcccctccaggcacagttcttccctgtccaacctctgtgcccagaaggcctggtcaaaggaggccaccaccaccaccgccaccgccaccactaccacctccgccgccgccgccaccactgcctccactaccgctgccacccctgaagaagagagggaaccacagcacaggcctgtgtctccttgtgatgtttttcatggttctggttgccttggtaggattgggcctggggatgtttcagctcttccacctacagaaggagctggcagaactccgagagtctaccagccagatgcacacagcatcatctttggagaagcaaataggccaccccagtccaccccctgaaaaaaaggagctgaggaaagtggcccatttaacaggcaagtccaactcaaggtccatgcctctggaatgggaagacacctatggaattgtcctgctttctggagtgaagtataagaagggtggccttgtgatcaatgaaactgggctgtactttgtatattccaaagtatacttccggggtcaatcttgcaacaacctgcccctgagccacaaggtctacatgaggaactctaagtatccccaggatctggtgatgatggaggggaagatgatgagctactgcactactgggcagatgtgggcccgcagcagctacctgggggcagtgttcaatcttaccagtgctgatcatttatatgtcaacgtatctgagctctctctggtcaattttgaggaatctcagacgtttttcggcttatataagctctaagagaagcactttgggattctttccattatgattctttgttacaggcaccgagaatgttgtattcagtgagggtcttcttacatgcatttgaggtcaagtaagaagacatgaaccaagtggaccttgagaccacagggttcaaaatgtctgtagctcctcaactcacctaatgtttatgagccagacaaatggaggaatatgacggaagaacatagaactctgggctgccatgtgaagagggagaagcatgaaaaagcagctaccaggtgttctacactcatcttagtgcctgagagtatttaggcagattgaaaaggacaccttttaactcacctctcaaggtgggccttgctacctcaagggggactgtctttcagatacatggttgtgacctgaggatttaagggatggaaaaggaagactagaggcttgcataataagctaaagaggctgaaagaggccaatgccccactggcagcatcttcacttctaaatgcatatcctgagccatcggtgaaactaacagataagcaagagagatgttttggggactcatttcattcctaacacagcatgtgtatttccagtgcaattgtaggggtgtgtgtgtgtgtgtgtgtgtgtgtgtgtgtatgactaaagagagaatgtagatattgtgaagtacatattaggaaaatatgggttgcatttggtcaagattttgaatgcttcctgacaatcaactctaatagtgcttaaaaatcattgattgtcagctactaatgatgttttcctataatataataaatatttatgtagatgtgcatttttgtgaaatgaaaacatgtaataaaaagtatatgttaggatacaaaaaaaaaaaaaaaaaaaaaaaaaaaaaaaaaaaaaaaaaaaaaaaaaaaa

SEQ ID NO: 135 - DNA, 3109 bp, Homo sapiens
  gene (1)..(3109): Accession No. NM_005449
agcctgagaatagttagcaaacaagggaggttgtcatttcctcatcgtcaagctttgttcctcgtgggggctagaaatctctttccagttccagattgtgaagggttcctgagtaagcagcgtgtctccatccccctctctaggggctcttggatggaccttgcactctagaagggacaatggacttctggctttggccactttacttcctgccagtatcgggggccctgaggatcctcccagaagtaaaggtagagggggagctgggcggatcagttaccatcaagtgcccacttcctgaaatgcatgtgaggatatatctgtgccgggagatggctggatctggaacatgtggtaccgtggtatccaccaccaacttcatcaaggcagaatacaagggccgagttactctgaagcaatacccacgcaagaatctgttcctagtggaggtaacacagctgacagaaagtgacagcggagtctatgcctgcggagcgggcatgaacacagaccggggaaagacccagaaagtcaccctgaatgtccacagtgaatacgagccatcatgggaagagcagccaatgcctgagactccaaaatggtttcatctgccctatttgttccagatgcctgcatatgccagttcttccaaattcgtaaccagagttaccacaccagctcaaaggggcaaggtccctccagttcaccactcctcccccaccacccaaatcacccaccgccctcgagtgtccagagcatcttcagtagcaggtgacaagccccgaaccttcctgccatccactacagcctcaaaaatctcagctctggaggggctgctcaagccccagacgcccagctacaaccaccacaccaggctgcacaggcagagagcactggactatggctcacagtctgggagggaaggccaaggatttcacatcctgatcccgaccatcctgggccttttcctgctggcacttctggggctggtggtgaaaagggccgttgaaaggaggaaagccctctccaggcgggcccgccgactggccgtgaggatgcgcgccctggagagctcccagaggccccgcgggtcgccgcgaccgcgctcccaaaacaacatctacagcgcctgcccgcggcgcgctcgtggagcggacgctgcaggcacaggggaggcccccgttcccggccccggagcgccgttgccccccgccccgctgcaggtgtctgaatctccctggctccatgccccatctctgaagaccagctgtgaatacgtgagcctctaccaccagcctgccgccatgatggaggacagtgattcagatgactacatcaatgttcctgcctgacaactccccagctatcccccaaccccaggctcggactgtggtgccaaggagtctcatctatctgctgatgtccaatacctgcttcatgtgttctcagagccctcatcacttcccatgccccatctcgactcccatccccatctatctgtgccctgagcatggctctgcccccaggtcgtcttgcacaccttggcagccccctgtagttgacaggtaagctgtaggcatgtagagcaattgtcccaatgccacttgcttcctttccaagccgtcgaacagactgtgggatttgcagagtgtttcttccatgtctttgaccacagggttgttgctgcccaggctctagatcacatggcatcaggctggggcagaggcatagctattgtctcgggcatccttcccagggttgggtcttacacaaatagaaggctcttgctctgagttatgtgacatgcctcagccccatggactaagcaggggtctggtataaaaacactcctggaaacgcctttgccctgatccaaatgttagcacttgctagtgaacgtctacttatctcaagttctatgctaaaggcaatttatcttgatgtgatgataaaccaaacttattagcaagatatgcatatatatccataaattctctttactctgtctccatcacttgatgcacataagtgccctgacctcagcatctcccctctaaaaaaaaaaaaaaaaaagtatctctttatctttcttccatagcctgacactgatatttgtgcacttaccttaactttggtctattttattcatccaaaaccattacatttcttggttttcacaaatgttccccatttcttagccagttccagacaatgtatagcaagcaggggaaggaaagcagtcaggagttcctgggtggccacggctctgcaatagcacttatgtcatggaagtgatatcccacctcctacatatactctttgcctaggtttttggaacaaggttatagtcagacactgtatctttagattgatgtcgaccacaaagttcagccagagcttgaggctagatgcacagccttgctattgggaagaaggccttttctagctgtacaacacagtctcactgggcattcatccagaaatagagaagaaagtctgccagacttgagttatgttgtcttttattagcagggaatgtcatcacagattggatagtacatccaggtgcaatgtcaccatcagcaaggtcagcttgacactcaagtggaagattagggaagaatgactaggataaaaaaaaaaggagggcaccaagggaaagggatgatggggtgagctggcgagtgtgggtgggaaatgaaatgtttattgaggatctgctttgtgctgggcactttaatccacattttatcgtttacttttcaaacagatgcaccttacccccaccccaatgctctgtccctgcagatatcagaagacagtgtgattttcatgctctgaagttcagttttacatccaagcatccctctctgttttttaacaatccaaagacaggccaaaaaaagcaccacagtttattaagtacttactaagcacccatccactgccccacactgtggcaaggattgtgaggggtaaagaagcatggggcacaatattctgctgccttcatgtaacttacagtctcacaaataaatagaacttcagttgaaatactgacattaattaaatagagttgtaataaaaaaaaaaaaaaaaaaaaaaaaaa

SEQ ID NO: 136 - DNA, 3923 bp, Homo sapiens
  gene (1)..(3923): Accession No. NM_003330
ggcagttagcccgcccgctcggcgcagggcgtggcttctcgtagccattaggaaacagcaaccctttcacctcagttttcttcactccggcatttgcagcagagcgaaaggtggtcgagtcctgaaggagggcctgatgtcttcatcattctcaaattcttgtaagctctgcgtcgggtgaaaccagacaaagccgcgagcccagggatgggagcacgcgggggacggcctgccggcggggacgacagcattgcgcctgggtgcagcagtgtgcgtctcggggaagggaagatattttaaggcgtgtctgagcagacggggaggcttttccaaacccaggcagcttcgtggcgtgtgcggtttcgacccggtcacacaaagcttcagcatgtcatgtgaggacggtcgggccctggaaggaacgctctcggaattggccgcggaaaccgatctgcccgttgtgtttgtgaaacagagaaagataggcggccatggtccaaccttgaaggcttatcaggagggcagacttcaaaagctactaaaaatgaacggccctgaagatcttcccaagtcctatgactatgaccttatcatcattggaggtggctcaggaggtctggcagctgctaaggaggcagcccaatatggcaagaaggtgatggtcctggactttgtcactcccacccctcttggaactagatggggtctcggaggaacatgtgtgaatgtgggttgcatacctaaaaaactgatgcatcaagcagctttgttaggacaagccctgcaagactctcgaaattatggatggaaagtcgaggagacagttaagcatgattgggacagaatgatagaagctgtacagaatcacattggctctttgaattggggctaccgagtagctctgcgggagaaaaaagtcgtctatgagaatgcttatgggcaatttattggtcctcacaggattaaggcaacaaataataaaggcaaagaaaaaatttattcagcagagagatttctcattgccactggtgaaagaccacgttacttgggcatccctggtgacaaagaatactgcatcagcagtgatgatcttttctccttgccttactgcccgggtaagaccctggttgttggagcatcctatgtcgctttggagtgcgctggatttcttgctggtattggtttagacgtcactgttatggttaggtccattcttcttagaggatttgaccaggacatggccaacaaaattggtgaacacatggaagaacatggcatcaagtttataagacagttcgtaccaattaaagttgaacaaattgaagcagggacaccaggccgactcagagtagtagctcagtccaccaatagtgaggaaatcattgaaggagaatataatacggtgatgctggcaataggaagagatgcttgcacaagaaaaattggcttagaaaccgtaggggtgaagataaatgaaaagactggaaaaatacctgtcacagatgaagaacagaccaatgtgccttacatctatgccattggcgatatattggaggataaggtggagctcaccccagttgcaatccaggcaggaagattgctggctcagaggctctatgcaggttccactgtcaagtgtgactatgaaaatgttccaaccactgtatttactcctttggaatatggtgcttgtggcctttctgaggagaaagctgtggagaagtttggggaagaaaatattgaggtttaccatagttacttttggccattggaatggacgattccgtcaagagataacaacaaatgttatgcaaaaataatctgtaatactaaagacaatgaacgtgttgtgggctttcacgtactgggtccaaatgctggagaagttacacaaggctttgcagctgcgctcaaatgtggactgaccaaaaagcagctggacagcacaattggaatccaccctgtctgtgcagaggtattcacaacattgtctgtgaccaagcgctctggggcaagcatcctccaggctggctgctgaggttaagccccagtgtggatgctgttgccaagactgcaaaccactggctcgtttccgtgcccaaatccaaggcgaagttttctagagggttcttgggctcttggcacctgcgtgtcctgtgcttaccaccgcccaaggcccccttggatctcttggataggagttggtgaatagaaggcaggcagcatcacactggggtcactgacagacttgaagctgacatttggcagggcatcgaagggatgcatccatgaagtcaccagtctcaagcccatgtggtaggcggtgatggaacaactgtcaaatcagttttagcatgacctttccttgtggattttcttattctcgttgtcaagttttctagggttgaatttttttcttttttctccatggtgttaatgatattagagatgaaaaacgttagcagttgatttttgtccaaaagcaagtcatggctagagtatccatgcaaggtgtcttgttgcatggaagggatagtttggctcccttggaggctatgtaggcttgtcccgggaaagagaactgtcctgcagctgaaatggactgttctttactgacctgctcagcagtttcttctctcatatattcccaaaacaagtacatctgcgatcaactctagccaaatttgcccctgtgtgctacatgatggatgattattattttaaggtctgtttaggaagggaaatggctacttggccagccattgcctggcatttggtagtatagtatgattctcaccattatttgtcatggaggcagacatacaccagaaatgggggagaaacagtacatatctttctgtctttagtttattgtgtgctggtctaagcaagctgagatcatttgcaatggaaaacacgtaacttgtttaaaagtttttctggtagctttagctttatgctaaaaaaaataatgacattgggtatctatttctttctaagactacattagtaggaaaataagtcttttcatgcttatgatttagctgttttgtggtaattgctttttaaaggaagttattaatatcataagttattattaatattttgaacacaggtggatgtgaaggattttcatttaaaaaccaagtggttttgactttttctgttgaatgaacaactgtgccttgtggaatttttgcagaagtgtttatgctttgttagcatttcaacttgcattattataaagaggtattaatgcctcagttatgtgtttgtcaatgtactggctgaggattctatctcagctgtcttttctaactgtgtaggttgagttttgaacacgtgcttgtggacatcaggcctcctgccagcagttcttgaagcttctttttcattcctgctactctacctgtatttctcagttgcagcactgagtggtcaaaatacatttctgggccacctcagggaacccatgcatctgcctggcatttaggcagcagagcccctgaccgtcccccacagggctctgcctcacgtcctcatctcatttggctgtgtaaagaaatgggaaaagggaaaaggagagagcaattgaggcagttgaccatattcagttttatttatttatttttaatttgtttttttctccaagtccaccagtctctgaaattagaacagtaggcggtatgagataatcaggcctaatcatgttgtgattctcttttcttagtggagtggaatgttctatccccacaagaaggattatatcttatagacttgtcttgttcagattctgtatttacccattttattgaaacatatactaagttccatgtatttttgttacaaatcttctgaaaaaaaacaaaacaatgtgaaacattaaaattaaaaggcattaataataaaaaaaaaaaaaaaaa

SEQ ID NO: 137 - DNA, 5881 bp, Homo sapiens
  gene (1)..(5881): Accession No. NM_007313
ggttggtgacttccacaggaaaagttctggaggagtagccaaagaccatcagcgtttcctttatgtgtgagaattgaaatgactagcattattgacccttttcagcatcccctgtgaatatttctgtttaggtttttcttcttgaaaagaaattgttattcagcccgtttaaaacaaatcaagaaacttttgggtaacattgcaattacatgaaattgataaccgcgaaaataattggaactcctgcttgcaagtgtcaacctaaaaaaagtgcttccttttgttatggaagatgtctttctgtgattgacttcaattgctgacttgtggagatgcagcgaatgtgaaatcccacgtatatgccatttccctctacgctcgctgaccgttctggaagatcttgaaccctcttctggaaaggggtacctattattactttatggggcagcagcctggaaaagtacttggggaccaaagaaggccaagcttgcctgccctgcattttatcaaaggagcagggaagaaggaatcatcgaggcatgggggtccacactgcaatgtttttgtggaacatgaagcccttcagcggccagtagcatctgactttgagcctcagggtctgagtgaagccgctcgttggaactccaaggaaaaccttctcgctggacccagtgaaaatgaccccaaccttttcgttgcactgtatgattttgtggccagtggagataacactctaagcataactaaaggtgaaaagctccgggtcttaggctataatcacaatggggaatggtgtgaagcccaaaccaaaaatggccaaggctgggtcccaagcaactacatcacgccagtcaacagtctggagaaacactcctggtaccatgggcctgtgtcccgcaatgccgctgagtatctgctgagcagcgggatcaatggcagcttcttggtgcgtgagagtgagagcagtcctggccagaggtccatctcgctgagatacgaagggagggtgtaccattacaggatcaacactgcttctgatggcaagctctacgtctcctccgagagccgcttcaacaccctggccgagttggttcatcatcattcaacggtggccgacgggctcatcaccacgctccattatccagccccaaagcgcaacaagcccactgtctatggtgtgtcccccaactacgacaagtgggagatggaacgcacggacatcaccatgaagcacaagctgggcgggggccagtacggggaggtgtacgagggcgtgtggaagaaatacagcctgacggtggccgtgaagaccttgaaggaggacaccatggaggtggaagagttcttgaaagaagctgcagtcatgaaagagatcaaacaccctaacctggtgcagctccttggggtctgcacccgggagcccccgttctatatcatcactgagttcatgacctacgggaacctcctggactacctgagggagtgcaaccggcaggaggtgaacgccgtggtgctgctgtacatggccactcagatctcgtcagccatggagtacctggagaagaaaaacttcatccacagagatcttgctgcccgaaactgcctggtaggggagaaccacttggtgaaggtagctgattttggcctgagcaggttgatgacaggggacacctacacagcccatgctggagccaagttccccatcaaatggactgcacccgagagcctggcctacaacaagttctccatcaagtccgacgtctgggcatttggagtattgctttgggaaattgctacctatggcatgtccccttacccgggaattgacctgtcccaggtgtatgagctgctagagaaggactaccgcatggagcgcccagaaggctgcccagagaaggtctatgaactcatgcgagcatgttggcagtggaatccctctgaccggccctcctttgctgaaatccaccaagcctttgaaacaatgttccaggaatccagtatctcagacgaagtggaaaaggagctggggaaacaaggcgtccgtggggctgtgagtaccttgctgcaggccccagagctgcccaccaagacgaggacctccaggagagctgcagagcacagagacaccactgacgtgcctgagatgcctcactccaagggccagggagagagcgatcctctggaccatgagcctgccgtgtctccattgctccctcgaaaagagcgaggtcccccggagggcggcctgaatgaagatgagcgccttctccccaaagacaaaaagaccaacttgttcagcgccttgatcaagaagaagaagaagacagccccaacccctcccaaacgcagcagctccttccgggagatggacggccagccggagcgcagaggggccggcgaggaagagggccgagacatcagcaacggggcactggctttcacccccttggacacagctgacccagccaagtccccaaagcccagcaatggggctggggtccccaatggagccctccgggagtccgggggctcaggcttccggtctccccacctgtggaagaagtccagcacgctgaccagcagccgcctagccaccggcgaggaggagggcggtggcagctccagcaagcgcttcctgcgctcttgctccgcctcctgcgttccccatggggccaaggacacggagtggaggtcagtcacgctgcctcgggacttgcagtccacgggaagacagtttgactcgtccacatttggagggcacaaaagtgagaagccggctctgcctcggaagagggcaggggagaacaggtctgaccaggtgacccgaggcacagtaacgcctccccccaggctggtgaaaaagaatgaggaagctgctgatgaggtcttcaaagacatcatggagtccagcccgggctccagcccgcccaacctgactccaaaacccctccggcggcaggtcaccgtggcccctgcctcgggcctcccccacaaggaagaagctggaaagggcagtgccttagggacccctgctgcagctgagccagtgacccccaccagcaaagcaggctcaggtgcaccagggggcaccagcaagggccccgccgaggagtccagagtgaggaggcacaagcactcctctgagtcgccagggagggacaaggggaaattgtccaggctcaaacctgccccgccgcccccaccagcagcctctgcagggaaggctggaggaaagccctcgcagagcccgagccaggaggcggccggggaggcagtcctgggcgcaaagacaaaagccacgagtctggttgatgctgtgaacagtgacgctgccaagcccagccagccgggagagggcctcaaaaagcccgtgctcccggccactccaaagccacagtccgccaagccgtcggggacccccatcagcccagcccccgttccctccacgttgccatcagcatcctcggccctggcaggggaccagccgtcttccaccgccttcatccctctcatatcaacccgagtgtctcttcggaaaacccgccagcctccagagcggatcgccagcggcgccatcaccaagggcgtggtcctggacagcaccgaggcgctgtgcctcgccatctctaggaactccgagcagatggccagccacagcgcagtgctggaggccggcaaaaacctctacacgttctgcgtgagctatgtggattccatccagcaaatgaggaacaagtttgccttccgagaggccatcaacaaactggagaataatctccgggagcttcagatctgcccggcgacagcaggcagtggtccagcggccactcaggacttcagcaagctcctcagttcggtgaaggaaatcagtgacatagtgcagaggtagcagcagtcaggggtcaggtgtcaggcccgtcggagctgcctgcagcacatgcgggctcgcccatacccgtgacagtggctgacaagggactagtgagtcagcaccttggcccaggagctctgcgccaggcagagctgagggccctgtggagtccagctctactacctacgtttgcaccgcctgccctcccgcaccttcctcctccccgctccgtctctgtcctcgaattttatctgtggagttcctgctccgtggactgcagtcggcatgccaggacccgccagccccgctcccacctagtgccccagactgagctctccaggccaggtgggaacggctgatgtggactgtctttttcatttttttctctctggagcccctcctcccccggctgggcctccttcttccacttctccaagaatggaagcctgaactgaggccttgtgtgtcaggccctctgcctgcactccctggccttgcccgtcgtgtgctgaagacatgtttcaagaaccgcatttcgggaagggcatgcacgggcatgcacacggctggtcactctgccctctgctgctgcccggggtggggtgcactcgccatttcctcacgtgcaggacagctcttgatttgggtggaaaacagggtgctaaagccaaccagcctttgggtcctgggcaggtgggagctgaaaaggatcgaggcatggggcatgtcctttccatctgtccacatccccagagcccagctcttgctctcttgtgacgtgcactgtgaatcctggcaagaaagcttgagtctcaagggtggcaggtcactgtcactgccgacatccctcccccagcagaatggaggcaggggacaagggaggcagtggctagtggggtgaacagctggtgccaaatagccccagactgggcccaggcaggtctgcaagggcccagagtgaaccgtcctttcacacatctgggtgccctgaaagggcccttcccctcccccactcctctaagacaaagtagattcttacaaggccctttcctttggaacaagacagccttcacttttctgagttcttgaagcatttcaaagccctgcctctgtgtagccgccctgagagagaatagagctgccactgggcacctgcgcacaggtgggaggaaagggcctggccagtcctggtcctggctgcactcttgaactgggcgaatgtcttatttaattaccgtgagtgacatagcctcatgttctgtgggggtcatcagggagggttaggaaaaccacaaacggagcccctgaaagcctcacgtatttcacagagcacgcctgccatcttctccccgaggctgccccaggccggagcccagatacgggggctgtgactctgggcagggacccggggtctcctggaccttgacagagcagctaactccgagagcagtgggcaggtggccgcccctgaggcttcacgccgggagaagccaccttcccaccccttcataccgcctcgtgccagcagcctcgcacaggccctagctttacgctcatcacctaaacttgtactttatttttctgatagaaatggtttcctctggatcgttttatgcggttcttacagcacatcacctctttgcccccgacggctgtgacgcagccggagggaggcactagtcaccgacagcggccttgaagacagagcaaagcgcccacccaggtcccccgactgcctgtctccatgaggtactggtcccttccttttgttaacgtgatgtgccactatattttacacgtatctcttggtatgcatcttttatagacgctcttttctaagtggcgtgtgcatagcgtcctgccctgccccctcgggggcctgtggtggctccccctctgcttctcggggtccagtgcattttgtttctgtatatgattctctgtggttttttttgaatccaaatctgtcctctgtagtattttttaaataaatcagtgtttacattagaa

SEQ ID NO: 138 - DNA, 12244 bp, Homo sapiens
  gene (1)..(12244): Accession No. NM_007314
gctcggtggtttaaagatggcggcggcggtggcggcggcggcggcggcggcgttgggggcgcggagccgcgacaggaggagggaaaagcagaatctgtgagtcgcctggaggcagcgcggcggctgccgtgaggaggccgggtgcggagccgccggtggcccagccactcagggccagggcctgggctgggagggagagaccggagcagcgccaggagcccgaggccggagccgaggaggaatgtgaccaggggtcggcgggggcgcgggagtacgcgagagcagggatggggcagcaggtgggccgcgtcggggaagctccggggctccagcagcctcagccccgcgggatccggggcagcagtgcagccaggccctccggccgcaggcgggacccggcggggcgcaccacagagaccggcttcaatatcttcacccagcatgatcactttgccagctgtgtggaggatggatttgagggagacaagactggaggcagtagtccagaagctttgcatcgtccctatggttgtgatgttgaaccccaggcactaaatgaggctatcaggtggagctccaaggagaacttgctcggagccactgagagtgaccctaatctcttcgttgcactttatgattttgtagcaagtggtgataacacactcagcatcactaaaggtgaaaagctacgagtccttggttacaaccagaatggtgagtggagtgaagttcgctctaagaatgggcagggctgggtgccaagcaactacatcaccccagtgaacagcctggaaaaacactcctggtaccatggacctgtgtcacgcagtgcagctgagtatctgctcagcagtctaatcaatggcagcttcctggtgcgagaaagtgagagtagccctgggcagctgtccatctcgctcaggtacgagggacgtgtgtatcactacaggatcaataccactgcagatggcaaggtgtatgtgactgctgagagccgcttcagcaccttggcagagcttgtacaccatcactccacagtggctgatgggctggtgacaacattacactacccagcacccaagtgtaataagcctacagtctatggtgtgtcccccatccacgacaaatgggaaatggagcgaacagatattaccatgaagcacaaacttgggggcggtcagtatggagaggtttacgttggcgtctggaagaaatacagccttacagttgctgtgaaaacattgaaggaagataccatggaggtagaagaattcctgaaagaagctgcagtaatgaaggaaatcaagcatcctaatctggtacaacttttaggtgtgtgtactttggagccaccattttacattgtgactgaatacatgccatacgggaatttgctggattacctccgagaatgcaaccgagaagaggtgactgcagttgtgctgctctacatggccactcagatttcttctgcaatggagtacttagagaagaagaatttcatccatagagatcttgcagctcgtaactgcctagtgggagaaaaccatgtggtaaaagtggctgactttggcttaagtagattgatgactggagacacttatactgctcatgctggagccaaatttcctattaagtggacagcaccagagagtcttgcctacaataccttctcaattaaatctgacgtctgggcttttggggtattgttgtgggaaattgctacctatggaatgtcaccatatccaggtattgacctgtctcaggtctatgacctactagaaaaaggatatcgaatggaacagcctgagggatgcccccctaaggtttatgaacttatgagagcatgctggaagtggagccctgccgataggccctcttttgctgaaacacaccaagcttttgaaaccatgttccatgactccagcatttctgaagaggtagctgaggagcttgggagagccgcctcctcgtcatctgttgttccatacctgccccggctacctatacttccttccaagactcggacactgaagaaacaggtggagaacaaggagaacattgaaggggcacaagatgccacagaaaattctgcttccagtttagcaccagggttcatcagaggtgcacaggcctctagtggatccccagcactgcctcgaaagcaaagagacaagtcacccagcagcctcttggaagatgccaaagagacatgcttcaccagggataggaaggggggcttcttcagctccttcatgaagaagagaaatgctcctacaccccccaaacgcagcagctccttccgagaaatggagaatcagccccataagaaatacgaactcacgggtaacttctcatctgttgcttctctacagcatgctgatgggttctctttcactcctgcccagcaagaggcgaatctggtgccacccaagtgctatggggggagctttgcacagaggaacctctgtaatgacgacggtggtgggggtgggggcagtggcactgctgggggtgggtggtctggcatcacaggcttctttacaccacgcttaatcaaaaagacactgggcttacgagcaggtaaacccacagccagtgatgacacttccaagccttttccaaggtcaaactctacatcttccatgtcctcagggcttccagagcaggataggatggcaatgacccttcccaggaactgccagaggtccaaactccagctggaaaggacagtgtccacctcttctcagccagaagagaatgtggacagggccaatgacatgcttccaaaaaaatcagaggaaagtgctgctccaagcagggagagaccaaaagccaagttattgcccagaggagccacagctcttcctctcagaacaccctctggggatctagccattacagagaaggaccctccaggggtgggagtggctggagtggcagctgcccccaagggtaaagagaagaatggtggggcacgacttgggatggctggagttccagaggatggagagcagccgggctggccttctccagccaaggctgcccccgtcctcccaaccactcacaaccacaaagtgccagtccttatctcacccactctgaaacacactccagctgacgtgcagctcattggcacagactctcaggggaataaattcaagctcttatctgagcatcaggtcacatcctctggagacaaggaccgaccccgacgggtaaaaccaaagtgtgccccacccccaccaccagtgatgagactactgcagcatccgtccatctgctcagaccctacagaagagccaactgccctaactgcaggacagtccacatcagaaacacaggaaggaggaaagaaggcagctctgggcgcagtgcccatcagtgggaaagctgggaggccagtgatgcctccacctcaagtgcctctgcccacatcttccatctcgccagccaaaatggccaatggcacagcaggtactaaagtggctctgagaaaaaccaaacaggccgctgagaaaatctcagcagacaaaatcagcaaagaggccctgctggaatgtgctgacctactgtccagtgcactcacggaacctgtgcccaacagccagctggtagacactggacaccagctgcttgactactgctcaggctatgtggactgcatccctcaaactcgcaacaaatttgccttccgagaggctgtgagcaaactggaactcagcctgcaggagctacaggtttcttcagcagctgctggtgtgcccgggacaaaccctgtccttaataacttattgtcatgtgtacaggaaatcagtgatgtggtgcagaggtagccactgttagcctggtgggaaaatgcacacatttctgaggggagagggaaaaggacttgttttcctgtgttcttgttttcagaaaatgaaagactcatacttgagtgtgtttatgtgaagtacctcagatccctgagttctcacgtttacagtttcatctcaaaaataagaagcaaaccacataagtataggagaggtaaattaagtgggggcaaggcagtagtggacagggttggaaactgcactggaaaatagggaacatgtgtatgtcataaggaaggcaatgcagcccatccctacctggaatgctgggaagtgctaggcagggctgctctcagcaagactgcagcagctgcacccagacctggggctctggtaggtactaatggtgattatgctccaatttacctaatgaatttggtgggacagcagaaaagaaagctgggaatgtaccaagagaaatttttgttcagggctgttggaagtagctgttagccttgcttccacaaggccattgctgctgtaataagaactgcaaatcagagtgctacaacataaaactgggaaatatggccctatctgaatgcctctgtcctattttccgctggtgtatcagttagtgcaggaagtaaagaatgctggaaagttgaatcagaaattgaaaaccttctaaaatcttacacagattagcagaagtcacttctcccagtctggtatattatttcataatggaccaggatcggcttcctgcctgttggtggctatctgtaaaccataagtacaggggtctccctagtggttcttctctgtcttttgctgggcaggctgtcttcctttattcctggtagcattcagagcattaaccagtgttgattttgaaaatagtagtccctacaggttctcacaaaggaatgaatcctgttctgatacagttcccctgcatactgacatactggccaaggacttgagcagctgtgtatttttctttatcaactaaaataccagggagatggtcttttcttgaaacccagtggcctgtatgtgactgagaggaaaagctggcttggtcctaatggctgtttctctgtacctttcccttcccttaccaccttaagcccaatccaggtagagaatagggagaggcattctcctctctatggatttgaagtgaatcacccccacattattctcacatgcttttcttctctcacatattcctccctactcccccacccaatcattgtgcttatttgtacagatcttattgggaatattctttatttattttgtcatttcacttctattttaagaatgcataattgaaggagtagtcattttcagggagcaccaggtagaccctgggaacctaatgacttaatccttaaatatgttttgcccttgaaaaataggccttttccttccttccttagttataattgtggaagctaattaggatggcatggaagtgaatctaatgagttaggtattattaatgttcttggtatcgggtctaattccagttactgcttcattctctttttaaagctttatgaatacttcccccatcctccccaaggagagctcaatacacacatatttttattttattctctcaaaggaatattagcttaggaagataggaattcaacattgagcactgagttttcttctggctctgtcattgatacactgtcaaaccacagcctcatctcttaatctatttaattaaggtaacagtacatgttctcaagggtgttgcaagtaagtgtgcagctatcccttggagagcctctctggaaagctcttttagtgcagtgttgttatgctgaattgttttccattatcttatttgctgagtagaaaatattaatgaaattaagaattgttgagattatatgaattgggctagaatactaaggggaaaactatgttttgaatagagtttggcatttttgaccaagaacaaaattgagttttcattggaaagaaaggaaaccttgattcttaccattgctgctccaaaggaggcccaggttaagaggattagaggagacacgcggtgctgggcattcctggcaggtgttgggtgatccccgcagtatgtcacctgcagttgcagcacaggcagctagtgattgggttcatctcctcctagtggttggaagagaactcagatgtaaaaaccagcggtccttctcccaccttctttcctgccattcttgctcatcatacatgtccgtaaacttgaagaactcgttttagcagctagccttttaaggtcgaggatgggaaagctaaaactgtagaatattattatgctgctttttaggtttatccctgttgttgtgggatgcaagttaagggattgtaattgtttttcagggtttttttgttttttgttttttaagcaagggctctattttcccttgagagttctggaactaagccttggagaaacactactgagtgtatttaggctccctggttttcttgcccaacaacaatctgaagggtagggggtgggggctgtgtcttactcaggggcagcacctagctgtcttgcctacagtgggtgcacgatatataaatggaattgatttttgtcaacactgtcaagagtggcattgactattggagcataccccgtccacatgatgcttgaactatgtaacttcaggggttgagggctcaaggttcaggttaaagaggcactgtcaacttactatacaagcataatttaggtttttcctttttctacttgaaaaggaccagcttaaacacaaacccttatgtaaattaaaaggtttgaatccaaagcagagagaactgcttctggaaaagtgtagtttaattttaactattctaaaagcaatgagcaaaggcccttgtccaaggcgttgacagttttctaaagtggttatgctgtatatctggatgcatgcctttgggctgccactgcttgattcctttcatgtacagataatattacttcagtttagatttcccactttaaaatgcagtgatttgtgttgaatacatcttgattgtgctttacctaaagtattttcttaaaaggctttgtgtaaaatttaaatgtatatattttcctgtagacttccatcatgattttcagagattagccttaaaaaatttggccctaagaaattcattcagtgtttttctagatgacctctgtacatagaggtcattatagtggagaccctttaccagcagcattttaagatttaaattagatagaaagtttcttaggattcaactgaaaattggctagtaaaatatgtcccaggtaataaagcatgctgactttgctaaggcactgcccatttttatttaactaaagtcatggagattttgagtttaaaggatgcagtatagatagtggtttagtgtttaggctctaatgccagtctaaaaggcaagtcatttaaccttgggagcctcagtttcctcactgtaaaacagggataataatagtaactacctcagggttgttgtaaggattaaatgagatgatatttgtaagatacttagctcaagtgcctggcacacaatgagcacactctataaatgttctactactactattattaacacctagtctagggatgcacagcagaatcccctagggttaaaaaacaaaacaaaacaaacaaaaaaaactgacggaatagccccactccagatcagaattcccagtgggctggggtctcggccagtgtattctccagtaatctcgccaggtgtttgaaacacccagtgctatctgaaaactatcagtaccccaaccctttggtttatagattaagaaactagcagaagatggttaaattacttgcctattgtctcagaacggttaattagtggcggagccaaggctagaattcaagtctcttgactttatggttgtggggtctttccaccatacctgctgccatgtgagacactgcaaaaaagtggctcagaccgacaatcagcctgtgtggtgctgcacactttctaaagcacatgctcctgacactttgaccttaaggggcttgaatgtggagtaatgggaacacaagccaagcaagcactcagtagaattcagtcatttaaaaaattcaatggggtcattcttttggacagacctcagcaacacagcaatgtgcactttgtagtaaagaaataccaacttgagtttttaaaaaacctagttagtcctacattcccttttctttaaaaaaactttattgttcacattattttaatgactatgagataatgtatatgacagcactttgagaaaatatcaactgtaatataactataaggttgtagtattgtctgtttaaaagataagacagttgattcaatgtggatggaccctgtggggtacctgaaaatgtagatacgtaagaatcacctctgtcatttatcacatttagaaatatgaaactgcttaacaggtatgagcaggtatagcaagtgtttgctaaagttgtagttcagagctgaattacttcaggaaactagggaccaactttttggtttaattccgatctttaaaaagtaagaatgtgtactcactccagaacacagaagctcttccaaggaccttgactcaagaaggatgaggtcctcttactcttctccatttatccactatatgcttggccatttatcctaaatgtggtgggaacagacttgttatctgttgatgttgacagtgtcttttttaacctatgtcctgcatagttttgttaggtttacagggggaggtggatggccataaaaccagtgcactttgggaattacttttctaggatttcctaccagttataaatgacattgacatttgtcatcttttttttctttttctaaaaagaatagctgaatttaattcacctattataaaatactcaaaagtaaattgccttggtggccacttctgaattatagctacatttcattatgaccccttctgctcccttccattttgctactgatgtcattcttgttatcaggctgtgcccctaccaggagttcatattgggttgacagggttatctatatttttgttcttgatttttgagtttcatcatcttgcattaaattgttccacctggatttggggttcatctctgtgccctaaggatctgctatgaccaatcctctttttgtaggtgggtctctggcttaagtattgataggcttcagcggtttgtgtctctgtcttagcttgtatcaagccagtagtagctcacttcctttgtaaattcctgcttcagtctgggatccgtaggagtatgtgagaacttctgaaacgtctccaactcttaacagtcaagatatctatatcatttggatagagttctggttttccaactactagacttaaagaaattctggccgggtgcggtggctcacgcctgtaatcccagcactttggggggctgaggcgggtggatcacgaggtcaggagattgagaccatcctggctaacacggtgaaaccccacctctactaaaaatacaaaaacttagctgggcgtggtggcgggcgcctgtagtcccagctactggggaggctgaggcaggagaatggcgtgaacccaggaggcggagcttgcagtgagcccagatcgcgccactgcactccagcctgggtgacagtgagactccgtctcaaaaaaaaaaaaaaaaaaaaaaaaaaaaaaaaaaagaaattctaatgcaaagcttgctttttttttcttttttccagcaagccagtagtaatagttattgttacttgctctgttcagcacaactgtagttcacttgaacttcactgtcattccctacgctcctctcttactgagaagcatgggtgggattcagggctgtgggacaagctacagcctactctggagcactcacccccatgactcagtccagcctgtctcttgggaagtttattgcaatgtgcagacggatgaatttctgcttttcatgccacctctctgaggtatgtattctatcttgagtatgtacaagatgataccttttggctgggcacagtggctcgtgcctgtaatcccagcactttgggagaccaagatgggcggatcacttgaggtcaggagtttgagaccagcctggccaacatggtgaaaccccgtctctactaaaaatataaaaattagccgggcgtagtacatgcctgtaatcccagctactcccgaggctgaggcagaattgcttgaacccaggaggcggaggttgcagtgagctgagatcgcgccgctgcactccagcctaagtgacagagtgagacacgttaagaagaaaaaaaaaaaaaaggataccttcatttctgactcaatatcctagatccaaaggacaggaaattagggaaggcttcaccctgtgggatcaagataagaagatcccatacttcttcccaggtaaggaggcctgtggcaggtcatgattcaaagctgacttggaatggcagaaactgctgagaggccacccttggagatttgtgccttcaaagatgggtttcatgagtctcagagaggaaaagacttgtcagctgggttgattttgcatgattattgaactagagctggtagacacgagcttctcagatggcagtggccagatcctccatctgtgagaatccgccacttgaagtggtttcctgagagtgttcacttggcagttgctgcgtttctcaagcccacctggcgaggtctcgccggacccttccctccaagtgcacttacttcttcatccccatgtacatctctaactttgaaattgtttacctctcctacaaaaatcttaccttttgacctgagcagagtagcaaagccctgttcactctgagggagcagctggcgtgttgaaggggaaaggccaggcacagcactgtcctcagaccacaccatatttggagcagaattgtgatacatgtcatctgtgtctattctggaaggttctttgttcatcactgtactcgcatcagcaaattttcagggtcctacctgtcactccaggctactgagctgaaccctcagaagctgaggtctccgagcatgctaagtaaccttttagaaaagctggaggcaaactgtcgaatgctagcaggctttatgaaaggaaacataaggagtttgtgtagtcagaacttgcttaaatttgcttcggaattaggcaccataaactttagttggagaatgggacttaaattttcacatatatgtatacttaattttcagcaattatgacacaataaaaagaatatgcaaatttattgttgtttcagaaggttttgcaggactgggaacgctttagtgtcatcaacagtaaacctcagatactgttctgcacagttcagaagtaccataccaggtattgtgagtggcaagaacgccaggggacagagatgcttctggtagatgagggccagagaaaccagctctcctccattttgacagcaatttctcactgtggccatttggcctccattatgttttgagaggaatttcttgagatcttgagaaatcaccatgattaggccaattgtcaatcagtattcagaaactagaaaggaacaatgagatacttgtttatggttctttagggcatatgtttgaaaaccctctcatctcagatctgtatagctggtgtgtgtttgtgtccataaatacacgtgcattgctgtcgtgcccattaagaaagggggagtaagtaaaagaggaatcgctcagatctttccttggatgaacagcagtggcgtggttggtgtgttgactgtgaacaggctgacttagctgttgatgtatactcagaacctccatctcctcccagaccctgcacttttccttctctgcagtctgattctctaatgactgtcactggacaaaccccagttttatgctcgcttagtaaaaataagtttaaacatttcatggtggttgacagaactttgtccccaaacatgcggattcaattctttaaaactcgttgaacgtttataccaaaggtcccgccccgcaggtgtgtatgtggtgcacagagggtgaggtttggagcatcgggcactgtgtgcattgctaaggggacatagtgagacaatgtgggatttaactaaaaacacatcaattgtgtgtcacattaccagtgttgtcaggtatttgttcttaattgttattgtaatatattttcagttgtttttctaatttaattctctccgtctgttgtctgactgtgaactgctaacagtgttaaacttgatgtaaataaatgaggcccttgaaagggactgctttctctgtcttctcacaaggtttgccaagttgtgttctgttttaaataaaggttgcaatattttattggcaaagtaaaaaaaaaaaaaaaaaa

SEQ ID NO: 139 - DNA, 3008 bp, Homo sapiens
  gene (1)..(3008): Accession No. NM_005163
taattatgggtctgtaaccaccctggactgggtgctcctcactgacggacttgtctgaacctctctttgtctccagcgcccagcactgggcctggcaaaacctgagacgcccggtacatgttggccaaatgaatgaaccagattcagaccggcaggggcgctgtggtttaggaggggcctggggtttctcccaggaggtttttgggcttgcgctggagggctctggactcccgtttgcgccagtggcctgcatcctggtcctgtcttcctcatgtttgaatttctttgctttcctagtctggggagcagggaggagccctgtgccctgtcccaggatccatgggtaggaacaccatggacagggagagcaaacggggccatctgtcaccaggggcttagggaaggccgagccagcctgggtcaaagaagtcaaaggggctgcctggaggaggcagcctgtcagctggtgcatcagaggctgtggccaggccagctgggctcggggagcgccagcctgagaggagcgcgtgagcgtcgcgggagcctcgggcaccatgagcgacgtggctattgtgaaggagggttggctgcacaaacgaggggagtacatcaagacctggcggccacgctacttcctcctcaagaatgatggcaccttcattggctacaaggagcggccgcaggatgtggaccaacgtgaggctcccctcaacaacttctctgtggcgcagtgccagctgatgaagacggagcggccccggcccaacaccttcatcatccgctgcctgcagtggaccactgtcatcgaacgcaccttccatgtggagactcctgaggagcgggaggagtggacaaccgccatccagactgtggctgacggcctcaagaagcaggaggaggaggagatggacttccggtcgggctcacccagtgacaactcaggggctgaagagatggaggtgtccctggccaagcccaagcaccgcgtgaccatgaacgagtttgagtacctgaagctgctgggcaagggcactttcggcaaggtgatcctggtgaaggagaaggccacaggccgctactacgccatgaagatcctcaagaaggaagtcatcgtggccaaggacgaggtggcccacacactcaccgagaaccgcgtcctgcagaactccaggcaccccttcctcacagccctgaagtactctttccagacccacgaccgcctctgctttgtcatggagtacgccaacgggggcgagctgttcttccacctgtcccgggagcgtgtgttctccgaggaccgggcccgcttctatggcgctgagattgtgtcagccctggactacctgcactcggagaagaacgtggtgtaccgggacctcaagctggagaacctcatgctggacaaggacgggcacattaagatcacagacttcgggctgtgcaaggaggggatcaaggacggtgccaccatgaagaccttttgcggcacacctgagtacctggcccccgaggtgctggaggacaatgactacggccgtgcagtggactggtgggggctgggcgtggtcatgtacgagatgatgtgcggtcgcctgcccttctacaaccaggaccatgagaagctttttgagctcatcctcatggaggagatccgcttcccgcgcacgcttggtcccgaggccaagtccttgctttcagggctgctcaagaaggaccccaagcagaggcttggcgggggctccgaggacgccaaggagatcatgcagcatcgcttctttgccggtatcgtgtggcagcacgtgtacgagaagaagctcagcccacccttcaagccccaggtcacgtcggagactgacaccaggtattttgatgaggagttcacggcccagatgatcaccatcacaccacctgaccaagatgacagcatggagtgtgtggacagcgagcgcaggccccacttcccccagttctcctactcggccagcggcacggcctgaggcggcggtggactgcgctggacgatagcttggagggatggagaggcggcctcgtgccatgatctgtatttaatggtttttatttctcgggtgcatttgagagaagccacgctgtcctctcgagcccagatggaaagacgtttttgtgctgtgggcagcaccctcccccgcagcggggtagggaagaaaactatcctgcgggttttaatttatttcatccagtttgttctccgggtgtggcctcagccctcagaacaatccgattcacgtagggaaatgttaaggacttctgcagctatgcgcaatgtggcattggggggccgggcaggtcctgcccatgtgtcccctcactctgtcagccagccgccctgggctgtctgtcaccagctatctgtcatctctctggggccctgggcctcagttcaacctggtggcaccagatgcaacctcactatggtatgctggccagcaccctctcctgggggtggcaggcacacagcagccccccagcactaaggccgtgtctctgaggacgtcatcggaggctgggcccctgggatgggaccagggatgggggatgggccagggtttacccagtgggacagaggagcaaggtttaaatttgttattgtgtattatgttgttcaaatgcattttgggggtttttaatctttgtgacaggaaagccctcccccttccccttctgtgtcacagttcttggtgactgtcccaccgggagcctccccctcagatgatctctccacggtagcacttgaccttttcgacgcttaacctttccgctgtcgccccaggccctccctgactccctgtgggggtggccatccctgggcccctccacgcctcctggccagacgctgccgctgccgctgcaccacggcgtttttttacaacattcaactttagtatttttactattataatataatatggaaccttccctccaaattcttcaataaaagttgcttttcaaaaaaaaaaaaaaaaaaaaaa

SEQ ID NO: 140 - DNA, 4338 bp, Homo sapiens
  gene (1)..(4338): Accession No. NM_001146
ggggcacactcatgcattcctgtcaagtcatcttgtgaaaggctgcctgcttccagcttggcttggatgtgcaaccttaataaaactcactgaggtctgggagaaaatagcagatctgcagcagatagggtagaggaaagggtctagaatatgtacacgcagctgactcaggcaggctccatgctgaacggtcacacagagaggaaacaataaatctcagctactatgcaataaatatctcaagttttaacgaagaaaaacatcattgcagtgaaataaaaaattttaaaattttagaacaaagctaacaaatggctagttttctatgattcttcttcaaacgctttctttgagggggaaagagtcaaacaaacaagcagttttacctgaaataaagaactagttttagaggtcagaagaaaggagcaagttttgcgagaggcacggaaggagtgtgctggcagtacaatgacagttttcctttcctttgctttcctcgctgccattctgactcacatagggtgcagcaatcagcgccgaagtccagaaaacagtgggagaagatataaccggattcaacatgggcaatgtgcctacactttcattcttccagaacacgatggcaactgtcgtgagagtacgacagaccagtacaacacaaacgctctgcagagagatgctccacacgtggaaccggatttctcttcccagaaacttcaacatctggaacatgtgatggaaaattatactcagtggctgcaaaaacttgagaattacattgtggaaaacatgaagtcggagatggcccagatacagcagaatgcagttcagaaccacacggctaccatgctggagataggaaccagcctcctctctcagactgcagagcagaccagaaagctgacagatgttgagacccaggtactaaatcaaacttctcgacttgagatacagctgctggagaattcattatccacctacaagctagagaagcaacttcttcaacagacaaatgaaatcttgaagatccatgaaaaaaacagtttattagaacataaaatcttagaaatggaaggaaaacacaaggaagagttggacaccttaaaggaagagaaagagaaccttcaaggcttggttactcgtcaaacatatataatccaggagctggaaaagcaattaaacagagctaccaccaacaacagtgtccttcagaagcagcaactggagctgatggacacagtccacaaccttgtcaatctttgcactaaagaaggtgttttactaaagggaggaaaaagagaggaagagaaaccatttagagactgtgcagatgtatatcaagctggttttaataaaagtggaatctacactatttatattaataatatgccagaacccaaaaaggtgttttgcaatatggatgtcaatgggggaggttggactgtaatacaacatcgtgaagatggaagtctagatttccaaagaggctggaaggaatataaaatgggttttggaaatccctccggtgaatattggctggggaatgagtttatttttgccattaccagtcagaggcagtacatgctaagaattgagttaatggactgggaagggaaccgagcctattcacagtatgacagattccacataggaaatgaaaagcaaaactataggttgtatttaaaaggtcacactgggacagcaggaaaacagagcagcctgatcttacacggtgctgatttcagcactaaagatgctgataatgacaactgtatgtgcaaatgtgccctcatgttaacaggaggatggtggtttgatgcttgtggcccctccaatctaaatggaatgttctatactgcgggacaaaaccatggaaaactgaatgggataaagtggcactacttcaaagggcccagttactccttacgttccacaactatgatgattcgacctttagatttttgaaagcgcaatgtcagaagcgattatgaaagcaacaaagaaatccggagaagctgccaggtgagaaactgtttgaaaacttcagaagcaaacaatattgtctcccttccagcaataagtggtagttatgtgaagtcaccaaggttcttgaccgtgaatctggagccgtttgagttcacaagagtctctacttggggtgacagtgctcacgtggctcgactatagaaaactccactgactgtcgggctttaaaaagggaagaaactgctgagcttgctgtgcttcaaactactactggaccttattttggaactatggtagccagatgataaatatggttaatttcatgtaaaacagaaaaaaagagtgaaaaagagaatatacatgaagaatagaaacaagcctgccataatcctttggaaaagatgtattataccagtgaaaaggtgttatatctatgcaaacctactaacaaattatactgttgcacaattttgataaaaatttagaacagcattgtcctctgagttggttaaatgttaatggatttcagaagcctaattccagtatcatacttactagttgatttctgcttacccatcttcaaatgaaaattccatttttgtaagccataatgaactgtagtacatggacaataagtgtgtggtagaaacaaactccattactctgatttttgatacagttttcagaaaaagaaatgaacataatcaagtaaggatgtatgtggtgaaaacttaccacccccatactatggttttcatttactctaaaaactgattgaatgatatataaatatatttatagcctgagtaaagttaaaagaatgtaaaatatatcatcaagttcttaaaataatatacatgcatttaatatttcctttgatattatacaggaaagcaatattttggagtatgttaagttgaagtaaaagcaagtactctggagcagttcattttacagtatctacttgcatgtgtatacatacatgtaacttcattattttaaaaatatttttagaactccaatactcaccctgttatgtcttgctaatttaaattttgctaattaactgaaacatgcttaccagattcacactgttccagtgtctataaaagaaacactttgaagtctataaaaaataaaataattataaatatcattgtacatagcatgtttatatctgcaaaaaacctaatagctaattaatctggaatatgcaacattgtccttaattgatgcaaataacacaaatgctcaaagaaatctactatatcccttaatgaaatacatcattcttcatatatttctccttcagtccattcccttaggcaatttttaatttttaaaaattattatcaggggagaaaaattggcaaaactattatatgtaagggaaatatatacaaaaagaaaattaatcatagtcacctgactaagaaattctgactgctagttgccataaataactcaatggaaatattcctatgggataatgtattttaagtgaatttttggggtgcttgaagttactgcattattttatcaagaagtcttctctgcctgtaagtgtccaaggttatgacagtaaacagtttttattaaaacatgagtcactatgggatgagaaaattgaaataaagctactgggcctcctctcataaaagagacagttgttggcaaggtagcaataccagtttcaaacttggtgacttgatccactatgccttaatggtttcctccatttgagaaaataaagctattcacattgttaagaaaaatactttttaaagtttaccatcaagtcttttttatatttatgtgtctgtattctacccctttttgccttacaagtgatatttgcaggtattataccatttttctattcttggtggcttcttcatagcaggtaagcctctccttctaaaaacttctcaactgttttcatttaagggaaagaaaatgagtattttgtccttttgtgttcctacagacactttcttaaaccagtttttggataaagaatactatttccaaactcatattacaaaaacaaaataaaataataaaaaaagaaagcatgatatttactgttttgttgtctgggtttgagaaatgaaatattgtttccaattatttataataaatcagtataaaatgttttatgattgttatgtgtattatgtaatacgtacatgtttatggcaatttaacatgtgtattcttttaattgtttcagaataggataattaggtattcgaattttgtctttaaaattcatgtggtttctatgcaaagttcttcatatcatcacaacattatttgatttaaataaaattgaaagtaatatttgtgcaa

SEQ ID NO: 141 - DNA, 5270 bp, Homo sapiens
  gene (1)..(5270): Accession No. NM_001147
aaagtgattgattcggatactgacactgtaggatctggggagagaggaacaaaggaccgtgaaagctgctctgtaaaagctgacacagccctcccaagtgagcaggactgttcttcccactgcaatctgacagtttactgcatgcctggagagaacacagcagtaaaaaccaggtttgctactggaaaaagaggaaagagaagactttcattgacggacccagccatggcagcgtagcagccctgcgttttagacggcagcagctcgggactctggacgtgtgtttgccctcaagtttgctaagctgctggtttattactgaagaaagaatgtggcagattgttttctttactctgagctgtgatcttgtcttggccgcagcctataacaactttcggaagagcatggacagcataggaaagaagcaatatcaggtccagcatgggtcctgcagctacactttcctcctgccagagatggacaactgccgctcttcctccagcccctacgtgtccaatgctgtgcagagggacgcgccgctcgaatacgatgactcggtgcagaggctgcaagtgctggagaacatcatggaaaacaacactcagtggctaatgaagcttgagaattatatccaggacaacatgaagaaagaaatggtagagatacagcagaatgcagtacagaaccagacggctgtgatgatagaaatagggacaaacctgttgaaccaaacagcggagcaaacgcggaagttaactgatgtggaagcccaagtattaaatcagaccacgagacttgaacttcagctcttggaacactccctctcgacaaacaaattggaaaaacagattttggaccagaccagtgaaataaacaaattgcaagataagaacagtttcctagaaaagaaggtgctagctatggaagacaagcacatcatccaactacagtcaataaaagaagagaaagatcagctacaggtgttagtatccaagcaaaattccatcattgaagaactagaaaaaaaaatagtgactgccacggtgaataattcagttcttcagaagcagcaacatgatctcatggagacagttaataacttactgactatgatgtccacatcaaactcagctaaggaccccactgttgctaaagaagaacaaatcagcttcagagactgtgctgaagtattcaaatcaggacacaccacgaatggcatctacacgttaacattccctaattctacagaagagatcaaggcctactgtgacatggaagctggaggaggcgggtggacaattattcagcgacgtgaggatggcagcgttgattttcagaggacttggaaagaatataaagtgggatttggtaacccttcaggagaatattggctgggaaatgagtttgtttcgcaactgactaatcagcaacgctatgtgcttaaaatacaccttaaagactgggaagggaatgaggcttactcattgtatgaacatttctatctctcaagtgaagaactcaattataggattcaccttaaaggacttacagggacagccggcaaaataagcagcatcagccaaccaggaaatgattttagcacaaaggatggagacaacgacaaatgtatttgcaaatgttcacaaatgctaacaggaggctggtggtttgatgcatgtggtccttccaacttgaacggaatgtactatccacagaggcagaacacaaataagttcaacggcattaaatggtactactggaaaggctcaggctattcgctcaaggccacaaccatgatgatccgaccagcagatttctaaacatcccagtccacctgaggaactgtctcgaactattttcaaagacttaagcccagtgcactgaaagtcacggctgcgcactgtgtcctcttccaccacagagggcgtgtgctcggtgctgacgggacccacatgctccagattagagcctgtaaactttatcacttaaacttgcatcacttaacggaccaaagcaagaccctaaacatccataattgtgattagacagaacacctatgcaaagatgaacccgaggctgagaatcagactgacagtttacagacgctgctgtcacaaccaagaatgttatgtgcaagtttatcagtaaataactggaaaacagaacacttatgttatacaatacagatcatcttggaactgcattcttctgagcactgtttatacactgtgtaaatacccatatgtcctgaattcaccatcactatcacaattaaaaggaagaaaaaaactctctaagccataaaaagacatattcagggatattctgagaaggggttactagaagtttaatatttggaaaaacagttagtgcatttttactccatctcttaggtgctttaaatttttatttcaaaaacagcgtatttacatttatgttgacagcttagttataagttaatgctcaaatacgtatttcaaatttatatggtagaaacttccagaatctctgaaattatcaacagaaacgtgccattttagtttatatgcagaccgtactatttttttctgcctgattgttaaatatgaaggtatttttagtaattaaatataacttattaggggatatgcctatgtttaacttttatgataatatttacaattttataatttgtttccaaaagacctaattgtgccttgtgataaggaaacttcttacttttaatgatgaggaaaattatacatttcattctatgacaaagaaactttactatcttctcactattctaaaacagaggtctgttttctttcctagtaagatatatttttatagaactagactacaatttaatttctggttgagaaaagccttctatttaagaaatttacaaagctatatgtctcaagattcacccttaaatttacttaaggaaaaaaataattgacactagtaagtttttttatgtcaatcagcaaactgaaaaaaaaaaaagggtttcaaagtgcaaaaacaaaatctgatgttcataatatatttaaatatttaccaaaaatttgagaacacagggctgggcgcagtggctcacacctataatcccagtacattggtaggcaaggtgggcagatcacctgaggtcaggagttcaagaccagcctggacaacatggtgaaaccctgtctctactaaataatacaaaaattagccaggcgtgctggcgggcacctgtaatcccagctactcgggaggctgaggcagggagaattgcttgcaccagggaggtagaggttgcagtgagccaagatcgcaccactgcactccagccggggcaacagagcaagactccatctcaaaaaaaaaaaaaaaaaaagaaagaaaagaaaatttgagaacacagctttatactcgggactacaaaaccataaactcctggagttttaactccttttgaaattttcatagtacaattaatactaatgaacatttgtgtaaagctttataatttaaaggcaatttctcatatattcttttctgaatcatttgcaaggaagttcagagtccagtctgtaactagcatctactatatgtctgtcttcaccttacagtgttctaccattattttttctttattccatttcaaaatctaatttattttaccccaacttctccccaccacttgacgtagttttagaacacacaggtgttgctacatatttggagtcaatgatggactctggcaaagtcaaggctctgttttatttccaccaaggtgcacttttccaacaactatttaactagttaagaacctccctatcttagaactgtatctactttatatttaagaaggttttatgaattcaacaacggtatcatggccttgtatcaagttgaaaaacaactgaaaataagaaaatttcacagcctcgaaagacaacaacaagtttctaggatatctcaatgacaagagtgatggatacttaggtagggaaacgctaatgcaggaaaaactggcaacaacacaatttatatcaattctctttgtaggcaggtgataaaaaattcaaggacaaatctcattatgtcattgtgcatcatatataatctcttatgagcgagaatggggggaatttgtgtttttactttacacttcaattccttacacggtatttcaaacaaacagttttgctgagaggagcttttgtctctccttaagaaaatgtttataaagctgaaaggaaatcaaacagtaatcttaaaaatgaaaacaaaacaacccaacaacctagataactacagtgatcagggagcacagttcaactccttgttatgttttagtcatatggcctactcaaacagctaaataacaacaccagtggcagataaaaatcaccatttatctttcagctattaatcttttgaatgaataaactgtgacaaacaaattaacatttttgaacatgaaaggcaacttctgcacaatcctgtatccaagcaaactttaaattatccacttaattattacttaatcttaaaaaaaattagaacccagaacttttcaatgaagcatttgaaagttgaagtggaatttaggaaagccataaaaatataaatactgttatcacagcaccagcaagccataatctttatacctatcagttctatttctattaacagtaaaaacattaagcaagatataagactacctgcccaagaattcagtcttttttcatttttgtttttctcagttctgaggatgttaatcgtcaaattttctttggactgcattcctcactactttttgcacaatggtctcacgttctcacatttgttctcgcgaataaattgataaaaggtgttaagttctgtgaatgtctttttaattatgggcataattgtgcttgactggataaaaacttaagtccacccttatgtttataataatttcttgagaacagcaaactgcatttaccatcgtaaaacaacatctgacttacgggagctgcagggaagtggtgagacagttcgaacggctcctcagaaatccagtgacccaattctaaagaccatagcacctgcaagtgacacaacaagcagatttattatacatttattagccttagcaggcaataaaccaagaatcactttgaagacacagcaaaaagtgatacactccgcagatctgaaatagatgtgttctcagacaacaaagtcccttcagaatcttcatgttgcataaatgttatgaatattaataaaaagttgattgagaaaaa

SEQ ID NO: 142 - DNA, 1731 bp, Homo sapiens
  gene (1)..(1731): Accession No. NM_138293
gaattcttaacagtaaagttctgtaattgagacagaattcccaaataaagtcaagagtaaaattcagatagaggagcagttatacatcagtgggaaatttggttggcagaaaaattaccaggtcatacaacttaatgatagacctgaagtcttatttaaaatgattctctaaaattgaagaattgaattaagggggccttgtttggctgattttcatactttttcctctcagtctacaggttggctgcatagaagaaaaaggtagagttatttataatcttgtaaatcttggactttgagtcatctattttcttttacagtcatcgaatacttttggaaataaggtaatatatgccttttgagctgtcttgacgttcacagatataaaatattaaatatattttaattttgtgcccttgcagattgatcacttattcattagtaatttaccagagattgtggtggagttattgatgacgttacatgagccagcaaattctagtgccagtcagagcactgacctctgtgacttttcaggggatttggatcctgctcctaatccacctcattttccatcgcatgtgattaaagcaacatttgcctatatcagcaattgtcataaaaccaagttaaaaagcattttagaaattctttccaaaagccctgattcctatcagaaaattcttcttgccatatgtgagcaagcagctgaaacaaataatgtttataagaagcacagaattcttaaaatatatcacctgtttgttagtttattactgaaagatataaaaagtggcttaggaggagcttgggcctttgttcttcgagacgttatttatactttgattcactatatcaaccaaaggtaaataacatatttagaccaatatataagcagtctttctatcctgttcttcctgtttttttgctttgttttgttttgttttgagacgaagactcactctgtccgcccaggctgggtgcagtcacggctcactgcatcctcaacctcctgggttcagattatccttcctcctcaccctgccgggtagctggggctacaggagcataccaccatgcctgactaattttttgtgttttttgtagaggtggggtttcaccatattgcccagggtggtctcaaactcctgggctcaagcgaactgtcagcctcagcctcccagtgtgctgggattacaggcatgagctactatgcccaacctatcctgttcttttaattgaaagtttatatgcttctaagaggtagataccagaatgttgctttctgaattttgctttttaagatgtctattatatttacttattagtttttaaaaattgcgctacttgcctgggaaacatagcagacctcgtttctactaaaaattttttaaaaaagaaaattagggcaaggtgtggtagctcacacctataatcccagcactttgggaggttgaggtaggtagattgcttgagcccaggagttagagaccagcctgggcaacatgatgtgaaaacccatctctacaaaaatttttaaaaaaataagccagggattgtggcatgcacctgtagtctcacctactccggaggctgaggtgggaggatggcttgcgctcaggaggcagaggttacaggttacagtgagcaaagattgtgccactacactccagcctgggagacagagcgagactcttgtctcaaaaaaaaaaaaaaaaaaaaaaaaaaaaa

SEQ ID NO: 143 - DNA, 1240 bp, Homo sapiens
  gene (1)..(1240): Accession No. NM_004322
aactagggcccggagcccggggtgctggagggaggcggcaggcccgggtcaggggcctcgagatcgggcttggggtgagacctgtgcgccgtcaccacgggcggggcggggcctgggtccaccggggttctgaggggagactgaggtcctgagccgacagcctcagctccctgccaggccagacccggcagacagatgagggcccaggaggcctggcgggcctgggggcgctacggtgggagaggaagccaggggtacctgcctctgccttccagggccaccgttggccccagctgtgccttgactacgtaacatcttgtcctcacagcccagagcatgttccagatcccagagtttgagccgagtgagcaggaagactccagctctgcagagaggggcctgggccccagccccgcaggggacgggccctcaggctccggcaagcatcatcgccaggccccaggcctcctgtgggacgccagtcaccagcaggagcagccaaccagcagcagccatcatggaggcgctggggctgtggagatccggagtcgccacagctcctaccccgcggggacggaggacgacgaagggatgggggaggagcccagcccctttcggggccgctcgcgctcggcgccccccaacctctgggcagcacagcgctatggccgcgagctccggaggatgagtgacgagtttgtggactcctttaagaagggacttcctcgcccgaagagcgcgggcacagcaacgcagatgcggcaaagctccagctggacgcgagtcttccagtcctggtgggatcggaacttgggcaggggaagctccgccccctcccagtgaccttcgctccacatcccgaaactccacccgttcccactgccctgggcagccatcttgaatatgggcggaagtacttccctcaggcctatgcaaaaagaggatccgtgctgtctcctttggagggagggctgacccagattcccttccggtgcgtgtgaagccacggaaggcttggtcccatcggaagttttgggttttccgcccacagccgccggaagtggctccgtggccccgccctcaggctccgggctttcccccaggcgcctgcgctaagtcgcgagccaggtttaaccgttgcgtcaccgggacccgagcccccgcgatgccctgggggccgtgctcactaccaaatgttaataaagcccgcgtctgtgccgccgaaaaaaaaaaaaaaaaa

SEQ ID NO: 144 - DNA, 7224 bp, Homo sapiens
  gene (1)..(7224): Accession No. NM_007294
gtaccttgatttcgtattctgagaggctgctgcttagcggtagccccttggtttccgtggcaacggaaaagcgcgggaattacagataaattaaaactgcgactgcgcggcgtgagctcgctgagacttcctggacgggggacaggctgtggggtttctcagataactgggcccctgcgctcaggaggccttcaccctctgctctgggtaaagttcattggaacagaaagaaatggatttatctgctcttcgcgttgaagaagtacaaaatgtcattaatgctatgcagaaaatcttagagtgtcccatctgtctggagttgatcaaggaacctgtctccacaaagtgtgaccacatattttgcaaattttgcatgctgaaacttctcaaccagaagaaagggccttcacagtgtcctttatgtaagaatgatataaccaaaaggagcctacaagaaagtacgagatttagtcaacttgttgaagagctattgaaaatcatttgtgcttttcagcttgacacaggtttggagtatgcaaacagctataattttgcaaaaaaggaaaataactctcctgaacatctaaaagatgaagtttctatcatccaaagtatgggctacagaaaccgtgccaaaagacttctacagagtgaacccgaaaatccttccttgcaggaaaccagtctcagtgtccaactctctaaccttggaactgtgagaactctgaggacaaagcagcggatacaacctcaaaagacgtctgtctacattgaattgggatctgattcttctgaagataccgttaataaggcaacttattgcagtgtgggagatcaagaattgttacaaatcacccctcaaggaaccagggatgaaatcagtttggattctgcaaaaaaggctgcttgtgaattttctgagacggatgtaacaaatactgaacatcatcaacccagtaataatgatttgaacaccactgagaagcgtgcagctgagaggcatccagaaaagtatcagggtagttctgtttcaaacttgcatgtggagccatgtggcacaaatactcatgccagctcattacagcatgagaacagcagtttattactcactaaagacagaatgaatgtagaaaaggctgaattctgtaataaaagcaaacagcctggcttagcaaggagccaacataacagatgggctggaagtaaggaaacatgtaatgataggcggactcccagcacagaaaaaaaggtagatctgaatgctgatcccctgtgtgagagaaaagaatggaataagcagaaactgccatgctcagagaatcctagagatactgaagatgttccttggataacactaaatagcagcattcagaaagttaatgagtggttttccagaagtgatgaactgttaggttctgatgactcacatgatggggagtctgaatcaaatgccaaagtagctgatgtattggacgttctaaatgaggtagatgaatattctggttcttcagagaaaatagacttactggccagtgatcctcatgaggctttaatatgtaaaagtgaaagagttcactccaaatcagtagagagtaatattgaagacaaaatatttgggaaaacctatcggaagaaggcaagcctccccaacttaagccatgtaactgaaaatctaattataggagcatttgttactgagccacagataatacaagagcgtcccctcacaaataaattaaagcgtaaaaggagacctacatcaggccttcatcctgaggattttatcaagaaagcagatttggcagttcaaaagactcctgaaatgataaatcagggaactaaccaaacggagcagaatggtcaagtgatgaatattactaatagtggtcatgagaataaaacaaaaggtgattctattcagaatgagaaaaatcctaacccaatagaatcactcgaaaaagaatctgctttcaaaacgaaagctgaacctataagcagcagtataagcaatatggaactcgaattaaatatccacaattcaaaagcacctaaaaagaataggctgaggaggaagtcttctaccaggcatattcatgcgcttgaactagtagtcagtagaaatctaagcccacctaattgtactgaattgcaaattgatagttgttctagcagtgaagagataaagaaaaaaaagtacaaccaaatgccagtcaggcacagcagaaacctacaactcatggaaggtaaagaacctgcaactggagccaagaagagtaacaagccaaatgaacagacaagtaaaagacatgacagcgatactttcccagagctgaagttaacaaatgcacctggttcttttactaagtgttcaaataccagtgaacttaaagaatttgtcaatcctagccttccaagagaagaaaaagaagagaaactagaaacagttaaagtgtctaataatgctgaagaccccaaagatctcatgttaagtggagaaagggttttgcaaactgaaagatctgtagagagtagcagtatttcattggtacctggtactgattatggcactcaggaaagtatctcgttactggaagttagcactctagggaaggcaaaaacagaaccaaataaatgtgtgagtcagtgtgcagcatttgaaaaccccaagggactaattcatggttgttccaaagataatagaaatgacacagaaggctttaagtatccattgggacatgaagttaaccacagtcgggaaacaagcatagaaatggaagaaagtgaacttgatgctcagtatttgcagaatacattcaaggtttcaaagcgccagtcatttgctccgttttcaaatccaggaaatgcagaagaggaatgtgcaacattctctgcccactctgggtccttaaagaaacaaagtccaaaagtcacttttgaatgtgaacaaaaggaagaaaatcaaggaaagaatgagtctaatatcaagcctgtacagacagttaatatcactgcaggctttcctgtggttggtcagaaagataagccagttgataatgccaaatgtagtatcaaaggaggctctaggttttgtctatcatctcagttcagaggcaacgaaactggactcattactccaaataaacatggacttttacaaaacccatatcgtataccaccactttttcccatcaagtcatttgttaaaactaaatgtaagaaaaatctgctagaggaaaactttgaggaacattcaatgtcacctgaaagagaaatgggaaatgagaacattccaagtacagtgagcacaattagccgtaataacattagagaaaatgtttttaaagaagccagctcaagcaatattaatgaagtaggttccagtactaatgaagtgggctccagtattaatgaaataggttccagtgatgaaaacattcaagcagaactaggtagaaacagagggccaaaattgaatgctatgcttagattaggggttttgcaacctgaggtctataaacaaagtcttcctggaagtaattgtaagcatcctgaaataaaaaagcaagaatatgaagaagtagttcagactgttaatacagatttctctccatatctgatttcagataacttagaacagcctatgggaagtagtcatgcatctcaggtttgttctgagacacctgatgacctgttagatgatggtgaaataaaggaagatactagttttgctgaaaatgacattaaggaaagttctgctgtttttagcaaaagcgtccagaaaggagagcttagcaggagtcctagccctttcacccatacacatttggctcagggttaccgaagaggggccaagaaattagagtcctcagaagagaacttatctagtgaggatgaagagcttccctgcttccaacacttgttatttggtaaagtaaacaatataccttctcagtctactaggcatagcaccgttgctaccgagtgtctgtctaagaacacagaggagaatttattatcattgaagaatagcttaaatgactgcagtaaccaggtaatattggcaaaggcatctcaggaacatcaccttagtgaggaaacaaaatgttctgctagcttgttttcttcacagtgcagtgaattggaagacttgactgcaaatacaaacacccaggatcctttcttgattggttcttccaaacaaatgaggcatcagtctgaaagccagggagttggtctgagtgacaaggaattggtttcagatgatgaagaaagaggaacgggcttggaagaaaataatcaagaagagcaaagcatggattcaaacttaggtgaagcagcatctgggtgtgagagtgaaacaagcgtctctgaagactgctcagggctatcctctcagagtgacattttaaccactcagcagagggataccatgcaacataacctgataaagctccagcaggaaatggctgaactagaagctgtgttagaacagcatgggagccagccttctaacagctacccttccatcataagtgactcttctgcccttgaggacctgcgaaatccagaacaaagcacatcagaaaaagcagtattaacttcacagaaaagtagtgaataccctataagccagaatccagaaggcctttctgctgacaagtttgaggtgtctgcagatagttctaccagtaaaaataaagaaccaggagtggaaaggtcatccccttctaaatgcccatcattagatgataggtggtacatgcacagttgctctgggagtcttcagaatagaaactacccatctcaagaggagctcattaaggttgttgatgtggaggagcaacagctggaagagtctgggccacacgatttgacggaaacatcttacttgccaaggcaagatctagagggaaccccttacctggaatctggaatcagcctcttctctgatgaccctgaatctgatccttctgaagacagagccccagagtcagctcgtgttggcaacataccatcttcaacctctgcattgaaagttccccaattgaaagttgcagaatctgcccagagtccagctgctgctcatactactgatactgctgggtataatgcaatggaagaaagtgtgagcagggagaagccagaattgacagcttcaacagaaagggtcaacaaaagaatgtccatggtggtgtctggcctgaccccagaagaatttatgctcgtgtacaagtttgccagaaaacaccacatcactttaactaatctaattactgaagagactactcatgttgttatgaaaacagatgctgagtttgtgtgtgaacggacactgaaatattttctaggaattgcgggaggaaaatgggtagttagctatttctgggtgacccagtctattaaagaaagaaaaatgctgaatgagcatgattttgaagtcagaggagatgtggtcaatggaagaaaccaccaaggtccaaagcgagcaagagaatcccaggacagaaagatcttcagggggctagaaatctgttgctatgggcccttcaccaacatgcccacagatcaactggaatggatggtacagctgtgtggtgcttctgtggtgaaggagctttcatcattcacccttggcacaggtgtccacccaattgtggttgtgcagccagatgcctggacagaggacaatggcttccatgcaattgggcagatgtgtgaggcacctgtggtgacccgagagtgggtgttggacagtgtagcactctaccagtgccaggagctggacacctacctgataccccagatcccccacagccactactgactgcagccagccacaggtacagagccacaggaccccaagaatgagcttacaaagtggcctttccaggccctgggagctcctctcactcttcagtccttctactgtcctggctactaaatattttatgtacatcagcctgaaaaggacttctggctatgcaagggtcccttaaagattttctgcttgaagtctcccttggaaatctgccatgagcacaaaattatggtaatttttcacctgagaagattttaaaaccatttaaacgccaccaattgagcaagatgctgattcattatttatcagccctattctttctattcaggctgttgttggcttagggctggaagcacagagtggcttggcctcaagagaatagctggtttccctaagtttacttctctaaaaccctgtgttcacaaaggcagagagtcagacccttcaatggaaggagagtgcttgggatcgattatgtgacttaaagtcagaatagtccttgggcagttctcaaatgttggagtggaacattggggaggaaattctgaggcaggtattagaaatgaaaaggaaacttgaaacctgggcatggtggctcacgcctgtaatcccagcactttgggaggccaaggtgggcagatcactggaggtcaggagttcgaaaccagcctggccaacatggtgaaaccccatctctactaaaaatacagaaattagccggtcatggtggtggacacctgtaatcccagctactcaggtggctaaggcaggagaatcacttcagcccgggaggtggaggttgcagtgagccaagatcataccacggcactccagcctgggtgacagtgagactgtggctcaaaaaaaaaaaaaaaaaaaggaaaatgaaactagaagagatttctaaaagtctgagatatatttgctagatttctaaagaatgtgttctaaaacagcagaagattttcaagaaccggtttccaaagacagtcttctaattcctcattagtaataagtaaaatgtttattgttgtagctctggtatataatccattcctcttaaaatataagacctctggcatgaatatttcatatctataaaatgacagatcccaccaggaaggaagctgttgctttctttgaggtgatttttttcctttgctccctgttgctgaaaccatacagcttcataaataattttgcttgctgaaggaagaaaaagtgtttttcataaacccattatccaggactgtttatagctgttggaaggactaggtcttccctagcccccccagtgtgcaagggcagtgaagacttgattgtacaaaatacgttttgtaaatgttgtgctgttaacactgcaaataaacttggtagcaaacacttccaaaaaaaaaaaaaaaaaa

SEQ ID NO: 145 - DNA, 2914 bp, Homo sapiens
  gene (1)..(2914): Accession No. NM_001228
gtgctctgagtttttggtttctgtttcaccttgtgtctgagctggtctgaaggctggttgttcagactgagcttcctgcctgcctgtaccccgccaacagcttcagaagaaggtgactggtggctgcctgaggaataccagtgggcaagagaattagcatttctggagcatctgctgtctgagcagcccctgggtgcgtccactttctgggcacgtgaggttgggccttggccgcctgagcccttgagttggtcacttgaaccttgggaatattgagattatattctcctgccttttaaaaagatggacttcagcagaaatctttatgatattggggaacaactggacagtgaagatctggcctccctcaagttcctgagcctggactacattccgcaaaggaagcaagaacccatcaaggatgccttgatgttattccagagactccaggaaaagagaatgttggaggaaagcaatctgtccttcctgaaggagctgctcttccgaattaatagactggatttgctgattacctacctaaacactagaaaggaggagatggaaagggaacttcagacaccaggcagggctcaaatttctgcctacaggttccacttctgccgcatgagctgggctgaagcaaacagccagtgccagacacagtctgtacctttctggcggagggtcgatcatctattaataagggtcatgctctatcagatttcagaagaagtgagcagatcagaattgaggtcttttaagtttcttttgcaagaggaaatctccaaatgcaaactggatgatgacatgaacctgctggatattttcatagagatggagaagagggtcatcctgggagaaggaaagttggacatcctgaaaagagtctgtgcccaaatcaacaagagcctgctgaagataatcaacgactatgaagaattcagcaaaggggaggagttgtgtggggtaatgacaatctcggactctccaagagaacaggatagtgaatcacagactttggacaaagtttaccaaatgaaaagcaaacctcggggatactgtctgatcatcaacaatcacaattttgcaaaagcacgggagaaagtgcccaaacttcacagcattagggacaggaatggaacacacttggatgcaggggctttgaccacgacctttgaagagcttcattttgagatcaagccccacgatgactgcacagtagagcaaatctatgagattttgaaaatctaccaactcatggaccacagtaacatggactgcttcatctgctgtatcctctcccatggagacaagggcatcatctatggcactgatggacaggaggcccccatctatgagctgacatctcagttcactggtttgaagtgcccttcccttgctggaaaacccaaagtgttttttattcaggcttgtcagggggataactaccagaaaggtatacctgttgagactgattcagaggagcaaccctatttagaaatggatttatcatcacctcaaacgagatatatcccggatgaggctgactttctgctggggatggccactgtgaataactgtgtttcctaccgaaaccctgcagagggaacctggtacatccagtcactttgccagagcctgagagagcgatgtcctcgaggcgatgatattctcaccatcctgactgaagtgaactatgaagtaagcaacaaggatgacaagaaaaacatggggaaacagatgcctcagcctactttcacactaagaaaaaaacttgtcttcccttctgattgatggtgctattttgtttgttttgttttgttttgtttttttgagacagaatctcgctctgtcgcccaggctggagtgcagtggcgtgatctcggctcaccgcaagctccgcctcccgggttcaggccattctcctgcctcagcctcccgagtagctgggactacaggggcccgccaccacacctggctaattttttaaaaatatttttagtagagacagggtttcactgtgttagccagggtggtcttgatctcctgacctcgtgatccacccacctcggcctcccaaagtgctgggattacaggcgtgagccaccgcgcctggccgatggtactatttagatataacactatgtttatttactaattttctagattttctactttattaattgttttgcacttttttataagagctaaagttaaataggatattaacaacaataacactgtctcctttctcttatgcttaaggctttgggaatgtttttagctggtggcaataaataccagacacgtacaaaatccagctatgaatatagagggcttatgattcagattgttatctatcaactataagcccactgttaatattctattaactttaattctctttcaaagctaaattccacactaccacattaaaaaaattagaaagtagccacgtatggtggctcatgtctataatcccagcactttgggaggttgaggtgggaggattgcttgaacccaagaggtcaaggctgcagtgagccatgttcacaccgctgcactcaagcttgggtgacagaacaagaccccgtctcaaaaaaaattttttttttaataaaacaaaatttgtttgaaatcttttaaaaattcaaatgatttttacaagttttaaataagctctccccaaacttgctttatgccttcttattgcttttatgatatatatatgcttggctaactatatttgctttttgctaacaatgctctggggtctttttatgcatttgcatttgctctttcatctctgcttggattattttaaatcattaggaattaagttatctttaaaatttaagtatcttttttcaaaaacattttttaatagaataaaatataatttgatcttattaaa

SEQ ID NO: 146 - DNA, 1958 bp, Homo sapiens
  gene (1)..(1958): Accession No. NM_001238
agcagccggcgcggccgccagcgcggtgtagggggcaggcgcggatcccgccaccgccgcgcgctcggcccgccgactcccggcgccgccgccgccactgccgtcgccgccgccgcctgccgggactggagcgcgccgtccgccgcggacaagaccctggcctcaggccggagcagccccatcatgccgagggagcgcagggagcgggatgcgaaggagcgggacaccatgaaggaggacggcggcgcggagttctcggctcgctccaggaagaggaaggcaaacgtgaccgtttttttgcaggatccagatgaagaaatggccaaaatcgacaggacggcgagggaccagtgtgggagccagccttgggacaataatgcagtctgtgcagacccctgctccctgatccccacacctgacaaagaagatgatgaccgggtttacccaaactcaacgtgcaagcctcggattattgcaccatccagaggctccccgctgcctgtactgagctgggcaaatagagaggaagtctggaaaatcatgttaaacaaggaaaagacatacttaagggatcagcactttcttgagcaacaccctcttctgcagccaaaaatgcgagcaattcttctggattggttaatggaggtgtgtgaagtctataaacttcacagggagaccttttacttggcacaagatttctttgaccggtatatggcgacacaagaaaatgttgtaaaaactcttttacagcttattgggatttcatctttatttattgcagccaaacttgaggaaatctatcctccaaagttgcaccagtttgcgtatgtgacagatggagcttgttcaggagatgaaattctcaccatggaattaatgattatgaaggcccttaagtggcgtttaagtcccctgactattgtgtcctggctgaatgtatacatgcaggttgcatatctaaatgacttacatgaagtgctactgccgcagtatccccagcaaatctttatacagattgcagagctgttggatctctgtgtcctggatgttgactgccttgaatttccttatggtatacttgctgcttcggccttgtatcatttctcgtcatctgaattgatgcaaaaggtttcagggtatcagtggtgcgacatagagaactgtgtcaagtggatggttccatttgccatggttataagggagacggggagctcaaaactgaagcacttcaggggcgtcgctgatgaagatgcacacaacatacagacccacagagacagcttggatttgctggacaaagcccgagcaaagaaagccatgttgtctgaacaaaatagggcttctcctctccccagtgggctcctcaccccgccacagagcggtaagaagcagagcagcgggccggaaatggcgtgaccaccccatccttctccaccaaagacagttgcgcgcctgctccacgttctcttctgtctgttgcagcggaggcgtgcgtttgcttttacagatatctgaatggaagagtgtttcttccacaacagaagtatttctgtggatggcatcaaacagggcaaagtgttttttattgaatgcttataggttttttttaaataagtgggtcaagtacaccagccacctccagacaccagtgcgtgctcccgatgctgctatggaaggtgctacttgacctaagggactcccacaacaacaaaagcttgaagctgtggagggccacggtggcgtggctctcctcgcaggtgttctgggctccgttgtaccaagtggagcaggtggttgcgggcaagcgttgtgcagagcccatagccagctgggcagggggctgccctctccacattatcagttgacagtgtacaatgcctttgatgaactgttttgtaagtgctgctatatctatccattttttaataaagataatactgtttttgagacaaaaaaaa

SEQ ID NO: 147 - DNA, 3717 bp, Homo sapiens
  gene (1)..(3717): Accession No. NM_001789
gaacagcgaagacagcgtgagcctgggccgttgcctcgaggctctcgcccggcttctcttgccgacccgccacgtttgtttggatttaatcttcaggttgccggcgcccgcccgcccgctggcctcgcggtgtgagagggaagcacccgtgcctgtggctggtggctggcgcctggagggtccgcacacccgcccggccgcgccgcttgcccgcggcagccgcgtccctgaaccgcggagtcgtgtttgtgtttgacccgcgggcgccggtggcgcgcggccgaggccggtgtcggcggggcggggcggtcgcggcggaggcagaggaagagggagcgggagctctgcgaggccgggcgccgccatggaactgggcccggagcccccgcaccgccgccgcctgctcttcgcctgcagcccccctcccgcgtcgcagcccgtcgtgaaggcgctatttggcgcttcagccgccgggggactgtcgcctgtcaccaacctgaccgtcactatggaccagctgcagggtctgggcagtgattatgagcaaccactggaggtgaagaacaacagtaatctgcagagaatgggctcctccgagtcaacagattcaggtttctgtctagattctcctgggccattggacagtaaagaaaaccttgaaaatcctatgagaagaatacattccctacctcagaagctgttgggatgtagtccagctctgaagaggagccattctgattctcttgaccatgacatctttcagctcatcgacccagatgagaacaaggaaaatgaagcctttgagtttaagaagccagtaagacctgtatctcgtggctgcctgcactctcatggactccaggagggtaaagatctcttcacacagaggcagaactctgccccagctcggatgctttcctcaaatgaaagagatagcagtgaaccagggaatttcattcctctttttacaccccagtcacctgtgacagccactttgtctgatgaggatgatggcttcgtggaccttctcgatggagagaatctgaagaatgaggaggagaccccctcgtgcatggcaagcctctggacagctcctctcgtcatgagaactacaaaccttgacaaccgatgcaagctgtttgactccccttccctgtgtagctccagcactcggtcagtgttgaagagaccagaacgatctcaagaggagtctccacctggaagtacaaagaggaggaagagcatgtctggggccagccccaaagagtcaactaatccagagaaggcccatgagactcttcatcagtctttatccctggcatcttcccccaaaggaaccattgagaacattttggacaatgacccaagggaccttataggagacttctccaagggttatctctttcatacagttgctgggaaacatcaggatttaaaatacatctctccagaaattatggcatctgttttgaatggcaagtttgccaacctcattaaagagtttgttatcatcgactgtcgatacccatatgaatacgagggaggccacatcaagggtgcagtgaacttgcacatggaagaagaggttgaagacttcttattgaagaagcccattgtacctactgatggcaagcgtgtcattgttgtgtttcactgcgagttttcttctgagagaggtccccgcatgtgccggtatgtgagagagagagatcgcctgggtaatgaataccccaaactccactaccctgagctgtatgtcctgaaggggggatacaaggagttctttatgaaatgccagtcttactgtgagccccctagctaccggcccatgcaccacgaggactttaaagaagacctgaagaagttccgcaccaagagccggacctgggcaggggagaagagcaagagggagatgtacagtcgtctgaagaagctctgagggcggcaggaccagccagcagcagcccaagcttccctccatccccctttaccctctttgctgcagagaaacttaagcaaaggggacagctgtgtgacatttggagagggggcctgggacttccatgccttaaacctacctcccacactcccaaggttggagcccagggcatcttgctggctacgcctcttctgtccctgttagacgtcctccgtccatatcagaactgtgccacaatgcagttctgagcaccgtgtcaagctgctctgagccacagtgggatgaaccagccggggccttatcgggctccagccatctcatgaggggagaggagacggaggggagtagagaagttacacagaaatgctgctggccaaatagcaaagacaacctgggaaggaaaggtctttgtgggataatccatatgtttaatttattcaacttcatcaatcactttattttatttttttttctaactcctggagacttattttactgcttcattaggttgaaatactgccattctaggtagggttttattatcccagggactacctcggcttttaatttaaaaaaaaaaaagaagtgggtaagaaaatgcaaacctgttataagttatcggacagaaagctaggtgctctgtcacccccaggaggcgctgtggtactggggctgctgctatttaagccaagaactgaggtcctggtgagagcgttggacccaggcttggctgcctgacataagctaaatctcccagacccaccactggctaccgatatctatttggtgggaggtgtggccctgttcttcctcaccccagttccatgacattggctggtataggagccacagtcaggaaagcacttgaggcagcatctgttgggccacccccggctcagtgctggaatgttgcagtgtaggtttcccagggaaggggggtgggggtaggtgggctccacaggatgggggaggagcatgtccactgagtatcttccttatgttgctgtgatattgatagcttttattttctaatttttaaaaaatggtcatattatgagtcaaagagtatcaaatcagtgttggatggaccacccaagggtgaggagaggggctggaagccctgggcattaggagaagggagtgggtgctggcatggacatgactggatagaattttctcaggagggagcttggtggattttgaaggtaaaactttctgggtttatcatgttttaattttagagacagggagtgatgaatcatcaccggttgtccccttatctaactccataaaagtgggaatttcaaaagaacacctcatccaaggagctggggcagacttcattgattctagagagacctgtttcagtgcctactcatccctgccctctggtgccagcctccttaccatcacggcttcactgaggtgtaggtgggtttttcttaaacaggagacagtctctcccctcttacctcaacttcttggggtgggaatcagtgatactggagatggctagttgctgtgttacgggtttgagttacatttggctataaaacaatcttgttgggaaaaatgtgggggagaggacttcttcctacacgcgcattgagacagattccaactggttaatgatattgtttgtaagaaagagattctgttggttgactgcctaaagagaaaggtgggatggccttcagattataccagcttagctagcattactaaccaactgttggaagctctgaaaataaaagatcttgaacccataaaaaaaaaaa

SEQ ID NO: 148 - DNA, 2325 bp, Homo sapiens
  gene (1)..(2325): Accession No. NM_001798
gcgggaagcaggggcggggcctctggtggcggtcgggaactcggtgggaggcggcaacattgtttcaagttggccaaattgacaagagcgagaggtatactgcgttccatcccgacccggggccacggtactgggccctgtttccccctcctcggcccccgagagccagggtccgccttctgcagggttcccaggcccccgctccagggccgggctgacccgactcgctggcgcttcatggagaacttccaaaaggtggaaaagatcggagagggcacgtacggagttgtgtacaaagccagaaacaagttgacgggagaggtggtggcgcttaagaaaatccgcctggacactgagactgagggtgtgcccagtactgccatccgagagatctctctgcttaaggagcttaaccatcctaatattgtcaagctgctggatgtcattcacacagaaaataaactctacctggtttttgaatttctgcaccaagatctcaagaaattcatggatgcctctgctctcactggcattcctcttcccctcatcaagagctatctgttccagctgctccagggcctagctttctgccattctcatcgggtcctccaccgagaccttaaacctcagaatctgcttattaacacagagggggccatcaagctagcagactttggactagccagagcttttggagtccctgttcgtacttacacccatgaggtggtgaccctgtggtaccgagctcctgaaatcctcctgggctgcaaatattattccacagctgtggacatctggagcctgggctgcatctttgctgagatggtgactcgccgggccctattccctggagattctgagattgaccagctcttccggatctttcggactctggggaccccagatgaggtggtgtggccaggagttacttctatgcctgattacaagccaagtttccccaagtgggcccggcaagattttagtaaagttgtacctcccctggatgaagatggacggagcttgttatcgcaaatgctgcactacgaccctaacaagcggatttcggccaaggcagccctggctcaccctttcttccaggatgtgaccaagccagtaccccatcttcgactctgatagccttcttgaagcccccagccctaatctcaccctctcctccagtgtgggcttgaccaggcttggccttgggctatttggactcaggtgggccctctgaacttgccttaaacactcaccttctagtcttggccagccaactctgggaatacaggggtgaaaggggggaaccagtgaaaatgaaaggaagtttcagtattagatgcacttaagttagcctccaccaccctttcccccttctcttagttattgctgaagagggttggtataaaaataattttaaaaaagccttcctacacgttagatttgccgtaccaatctctgaatgccccataattattatttccagtgtttgggatgaccaggatcccaagcctcctgctgccacaatgtttataaaggccaaatgatagcgggggctaagttggtgcttttgagaaccaagtaaaacaaaaccactgggaggagtctattttaaagaattcggttgaaaaaatagatccaatcagtttataccctagttagtgttttgcctcacctaataggctgggagactgaagactcagcccgggtggggctgcagaaaaatgattggccccagtccccttgtttgtcccttctacaggcatgaggaatctgggaggccctgagacagggattgtgcttcattccaatctattgcttcaccatggccttatgaggcaggtgagagatgtttgaatttttctcttccttttagtattcttagttgttcagttgccaaggatccctgatcccattttcctctgacgtccacctcctaccccataggagttagaagttagggtttaggcatcattttgagaatgctgacactttttcagggctgtgattgagtgagggcatgggtaaaaatatttctttaaaagaaggatgaacaattatatttatatttcaggttatatccaatagtagagttggctttttttttttttttttggtcatagtgggtggatttgttgccatgtgcaccttggggttttgtaatgacagtgctaaaaaaaaaaagcattttttttttatgatttgtctctgtcacccttgtccttgagtgctcttgctattaacgttatttgtaatttagtttgtagctcattaaaaaaatgtgcctagttttataaaaaaaaaaaaaaaaaacaaaaaaaaaaaaaa

SEQ ID NO: 149 - DNA, 1474 bp, Homo sapiens
  gene (1)..(1474): Accession No. NM_000075
agccctcccagtttccgcgcgcctctttggcagctggtcacatggtgagggtgggggtgagggggcctctctagcttgcggcctgtgtctatggtcgggccctctgcgtccagctgctccggaccgagctcgggtgtatggggccgtaggaaccggctccggggccccgataacgggccgcccccacagcaccccgggctggcgtgagggtctcccttgatctgagaatggctacctctcgatatgagccagtggctgaaattggtgtcggtgcctatgggacagtgtacaaggcccgtgatccccacagtggccactttgtggccctcaagagtgtgagagtccccaatggaggaggaggtggaggaggccttcccatcagcacagttcgtgaggtggctttactgaggcgactggaggcttttgagcatcccaatgttgtccggctgatggacgtctgtgccacatcccgaactgaccgggagatcaaggtaaccctggtgtttgagcatgtagaccaggacctaaggacatatctggacaaggcacccccaccaggcttgccagccgaaacgatcaaggatctgatgcgccagtttctaagaggcctagatttccttcatgccaattgcatcgttcaccgagatctgaagccagagaacattctggtgacaagtggtggaacagtcaagctggctgactttggcctggccagaatctacagctaccagatggcacttacacccgtggttgttacactctggtaccgagctcccgaagttcttctgcagtccacatatgcaacacctgtggacatgtggagtgttggctgtatctttgcagagatgtttcgtcgaaagcctctcttctgtggaaactctgaagccgaccagttgggcaaaatctttgacctgattgggctgcctccagaggatgactggcctcgagatgtatccctgccccgtggagcctttccccccagagggccccgcccagtgcagtcggtggtacctgagatggaggagtcgggagcacagctgctgctggaaatgctgacttttaacccacacaagcgaatctctgcctttcgagctctgcagcactcttatctacataaggatgaaggtaatccggagtgagcaatggagtggctgccatggaaggaagaaaagctgccatttcccttctggacactgagagggcaatctttgcctttatctctgaggctatggagggtcctcctccatctttctacagagattactttgctgccttaatgacattcccctcccacctctccttttgaggcttctccttctccttcccatttctctacactaaggggtatgttccctcttgtccctttccctacctttatatttggggtccttttttatacaggaaaaacaaaacaaagaaataatggtcttttttttttttttaaaaaaaaaaaaaaaaaaaaaaaaaaaaaaaa

SEQ ID NO: 150 - DNA, 1211 bp, Homo sapiens
  gene (1)..(1211): Accession No. NM_004935
agaaggccctgcgcgggcagacggggcggggctggaggctcaggtgccgcctcctctgcaacgccggggccagagtcttaaaaccgagggcccgcaggggtccccgcggccgccgcgatgcagaaatacgagaaactggaaaagattggggaaggcacctacggaactgtgttcaaggccaaaaaccgggagactcatgagatcgtggctctgaaacgggtgaggctggatgacgatgatgagggtgtgccgagttccgccctccgggagatctgcctactcaaggagctgaagcacaagaacatcgtcaggcttcatgacgtcctgcacagcgacaagaagctgactttggtttttgaattctgtgaccaggacctgaagaagtattttgacagttgcaatggtgacctcgatcctgagattgtaaagtcattcctcttccagctactaaaagggctgggattctgtcatagccgcaatgtgctacacagggacctgaagccccagaacctgctaataaacaggaatggggagctgaaattggctgattttggcctggctcgagcctttgggattcccgtccgctgttactcagctgaggtggtcacactgtggtaccgcccaccggatgtcctctttggggccaagctgtactccacgtccatcgacatgtggtcagccggctgcatctttgcagagctggccaatgctgggcggcctctttttcccggcaatgatgtcgatgaccagttgaagaggatcttccgactgctggggacgcccaccgaggagcagtggccctctatgaccaagctgccagactataagccctatccgatgtacccggccacaacatccctggtgaacgtcgtgcccaaactcaatgccacagggagggatctgctgcagaaccttctgaagtgtaaccctgtccagcgtatctcagcagaagaggccctgcagcacccctacttctccgacttctgtccgccctaggccccgggacccccggcctccaggctggggcctggcctatttaagccccctcttgagaggggtgagacagtgggggtgcctggtgcgctgtgctccagcagtgctgggcccagccggggtggggtgcctgagcccgaatttctcactccctttgtggactttatttaatttcataaattggctcctttcccacagtcaaaaaaaaaaaaaaaaaa

SEQ ID NO: 151 - DNA, 2168 bp, Homo sapiens
  gene (1)..(2168): Accession No. NM_000389
gtatatcagggccgcgctgagctgcgccagctgaggtgtgagcagctgccgaagtcagttccttgtggagccggagctgggcgcggattcgccgaggcaccgaggcactcagaggaggcgccatgtcagaaccggctggggatgtccgtcagaacccatgcggcagcaaggcctgccgccgcctcttcggcccagtggacagcgagcagctgagccgcgactgtgatgcgctaatggcgggctgcatccaggaggcccgtgagcgatggaacttcgactttgtcaccgagacaccactggagggtgacttcgcctgggagcgtgtgcggggccttggcctgcccaagctctaccttcccacggggccccggcgaggccgggatgagttgggaggaggcaggcggcctggcacctcacctgctctgctgcaggggacagcagaggaagaccatgtggacctgtcactgtcttgtacccttgtgcctcgctcaggggagcaggctgaagggtccccaggtggacctggagactctcagggtcgaaaacggcggcagaccagcatgacagatttctaccactccaaacgccggctgatcttctccaagaggaagccctaatccgcccacaggaagcctgcagtcctggaagcgcgagggcctcaaaggcccgctctacatcttctgccttagtctcagtttgtgtgtcttaattattatttgtgttttaatttaaacacctcctcatgtacataccctggccgccccctgccccccagcctctggcattagaattatttaaacaaaaactaggcggttgaatgagaggttcctaagagtgctgggcatttttattttatgaaatactatttaaagcctcctcatcccgtgttctccttttcctctctcccggaggttgggtgggccggcttcatgccagctacttcctcctccccacttgtccgctgggtggtaccctctggaggggtgtggctccttcccatcgctgtcacaggcggttatgaaattcaccccctttcctggacactcagacctgaattctttttcatttgagaagtaaacagatggcactttgaaggggcctcaccgagtgggggcatcatcaaaaactttggagtcccctcacctcctctaaggttgggcagggtgaccctgaagtgagcacagcctagggctgagctggggacctggtaccctcctggctcttgatacccccctctgtcttgtgaaggcagggggaaggtggggtcctggagcagaccaccccgcctgccctcatggcccctctgacctgcactggggagcccgtctcagtgttgagccttttccctctttggctcccctgtaccttttgaggagccccagctacccttcttctccagctgggctctgcaattcccctctgctgctgtccctcccccttgtcctttcccttcagtaccctctcagctccaggtggctctgaggtgcctgtcccacccccacccccagctcaatggactggaaggggaagggacacacaagaagaagggcaccctagttctacctcaggcagctcaagcagcgaccgccccctcctctagctgtgggggtgagggtcccatgtggtggcacaggcccccttgagtggggttatctctgtgttaggggtatatgatgggggagtagatctttctaggagggagacactggcccctcaaatcgtccagcgaccttcctcatccaccccatccctccccagttcattgcactttgattagcagcggaacaaggagtcagacattttaagatggtggcagtagaggctatggacagggcatgccacgtgggctcatatggggctgggagtagttgtctttcctggcactaacgttgagcccctggaggcactgaagtgcttagtgtacttggagtattggggtctgaccccaaacaccttccagctcctgtaacatactggcctggactgttttctctcggctccccatgtgtcctggttcccgtttctccacctagactgtaaacctctcgagggcagggaccacaccctgtactgttctgtgtctttcacagctcctcccacaatgctgaatatacagcaggtgctcaataaatgattcttagtgactttaaaaaaaaaaaaaaaaaaaa

SEQ ID NO: 152 - DNA, 1163 bp, Homo sapiens
  gene (1)..(1163): Accession No. NM_000077
ctcctccgagcactcgctcacggcgtccccttgcctggaaagataccgcggtccctccagaggatttgagggacagggtcggagggggctcttccgccagcaccggaggaagaaagaggaggggctggctggtcaccagagggtggggcggaccgcgtgcgctcggcggctgcggagagggggagagcaggcagcgggcggcggggagcagcatggagccggcggcggggagcagcatggagccttcggctgactggctggccacggccgcggcccggggtcgggtagaggaggtgcgggcgctgctggaggcgggggcgctgcccaacgcaccgaatagttacggtcggaggccgatccaggtcatgatgatgggcagcgcccgagtggcggagctgctgctgctccacggcgcggagcccaactgcgccgaccccgccactctcacccgacccgtgcacgacgctgcccgggagggcttcctggacacgctggtggtgctgcaccgggccggggcgcggctggacgtgcgcgatgcctggggccgtctgcccgtggacctggctgaggagctgggccatcgcgatgtcgcacggtacctgcgcgcggctgcggggggcaccagaggcagtaaccatgcccgcatagatgccgcggaaggtccctcagacatccccgattgaaagaaccagagaggctctgagaaacctcgggaaacttagatcatcagtcaccgaaggtcctacagggccacaactgcccccgccacaacccaccccgctttcgtagttttcatttagaaaatagagcttttaaaaatgtcctgccttttaacgtagatatatgccttcccccactaccgtaaatgtccatttatatcattttttatatattcttataaaaatgtaaaaaagaaaaacaccgcttctgccttttcactgtgttggagttttctggagtgagcactcacgccctaagcgcacattcatgtgggcatttcttgcgagcctcgcagcctccggaagctgtcgacttcatgacaagcattttgtgaactagggaagctcaggggggttactggcttctcttgagtcacactgctagcaaatggcagaaccaaagctcaaataaaaataaaataattttcattcattcactcaaaa

SEQ ID NO: 153 - DNA, 5910 bp, Homo sapiens
  gene (1)..(5910): Accession No. NM_030582
agctccagccgcactgccccgatggctccctacccctgtggctgccacatcctgctgctgctcttctgctgcctggcggctgcccgggccaacctgctgaacctgaactggctttggttcaataatgaggacaccagccatgcagctaccacgatccctgagccccaggggcccctgcctgtgcagcccacagcagataccaccacacacgtgaccccccggaatggttccacagagccagcgacagcccctggcagccctgagccaccctcagagctgctggaagatggccaggacacccccacttctgccgagagcccggacgcgccagaggagaacattgccggtgtcggagccgagatcctgaacgtggccaaaggcatccggagcttcgtccagctgtggaatgacactgtccccactgagagcttggccagggcggaaaccctggtcctggagactcctgtgggcccccttgccctcgctgggccttccagcaccccccaggagaatgggaccactctctggcccagccgtggcattcctagctctccgggcgcccacacaaccgaggctggcaccttgcctgcacccaccccatcgcctccctccctgggcaggccctgggcaccactcacggggccctcagtgccaccaccatcttcagagcgcatcagcgaggaggtggggctgctgcagctccttggggaccccccgccccagcaggtcacccagacggatgaccccgacgtcgggctggcctacgtctttgggccagatgccaacagtggccaagtggcccggtaccacttccccagcctcttcttccgtgacttctcactgctgttccacatccggccagccacagagggcccaggggtgctgttcgccatcacggactcggcgcaggccatggtcttgctgggcgtgaagctctctggggtgcaggacgggcaccaggacatctccctgctctacacagaaccaggtgcaggccagacccacacagccgccagcttccggctccccgccttcgtcggccagtggacacacttagccctcagtgtggcaggtggctttgtggccctctacgtggactgtgaggagttccagagaatgccgcttgctcggtcctcacggggcctggagctggagcctggcgccgggctcttcgtggctcaggcggggggagcggaccctgacaagttccagggggtgatcgctgagctgaaggtgcgcagggacccccaggtgagccccatgcactgcctggacgaggaaggcgatgactcagatggggcatccggagactctggcagcgggctcggggacgcccgggagcttctcagggaggagacgggcgcggccctaaaacccaggctccccgcgccaccccccgtcaccacgccacccttggctggaggcagcagcacggaagattccagaagtgaagaagtcgaggagcagaccacggtggcttcgttaggagctcagacacttcctggctcagattctgtctccacgtgggacgggagtgtccggacccctgggggccgcgtgaaagagggcggcctgaaggggcagaaaggggagccaggtgttccgggcccacctggccgggcaggccccccaggatccccatgcctacctggtcccccgggtctcccgtgcccagtgagtcccctgggtcctgcaggcccagcgttgcaaactgtccccggaccacaaggacccccagggcctccggggagggacggcacccctggaagggacggcgagccgggcgaccccggtgaagacggaaagccgggcgacaccgggccacaaggcttccccgggactccaggggacgtaggtcccaagggcgacaagggagaccctggggttggagagagagggcccccaggaccccaagggcctccagggcccccaggaccctccttcagacacgacaagctgaccttcattgacatggagggatctggcttcgggggcgatctggaggccctgcggggtcctcgaggcttccctggacctcccggaccccccggtgtcccaggcctgcccggcgagccaggccgctttggggtgaacagctccgacgtcccaggacccgccggccttcctggtgtgcctgggcgcgagggtccccccgggtttcctggcctcccgggacccccaggccctccgggaagagaggggcccccaggaaggactgggcagaaaggcagcctgggtgaagcaggcgccccaggacataaggggagcaagggagcccccggtcctgctggtgctcgtggggagagcggcctggcaggagcccccggacctgctggaccaccaggcccccctgggccccctgggcccccaggaccaggactccccgctggatttgatgacatggaaggctccggggggcccttctggtcaacagcccgaagcgctgatgggccacagggacctcccggcctgccgggacttaagggggatcctggcgtgcctgggctgccgggggcgaagggagaagttggagcagatggagtccccgggttccccggcctccctggcagagagggcattgctgggccccaggggccaaagggagacagaggcagccggggagaaaagggagatccagggaaggacggagtcgggcagccgggcctccctggcccccccggacccccgggacctgtggtctacgtgtcggagcaggacggatccgtcctgagcgtgccgggacctgagggccggccgggtttcgcaggctttcccggacctgcaggacccaagggcaacctgggctctaagggcgaacgaggctccccgggacccaagggtgagaagggtgaaccgggcagcatcttcagccccgacggcggtgccctgggccctgcccagaaaggagccaagggagagccgggcttccgaggacccccgggtccatacggacggccggggtacaagggagagattggctttcctggacggccgggtcgccccgggatgaacggattgaaaggagagaaaggggagccgggagatgccagccttggatttggcatgaggggaatgcccggccccccaggacctccagggcccccaggccctccagggactcctgtttacgacagcaatgtgtttgctgagtccagccgccccgggcctccaggattgccagggaatcagggccctccaggacccaagggcgccaaaggagaagtgggcccccccggaccaccagggcagtttccgtttgactttcttcagttggaggctgaaatgaagggggagaagggagaccgaggtgatgcaggacagaaaggcgaaaggggggagcccgggggcggcggtttcttcggctccagcctgcccggcccccccggccccccaggcccacgtggctaccctgggattccaggtcccaagggagagagcatccggggccagcccggcccacctggacctcagggaccccccggcatcggctacgaggggcgccagggccctcccggccccccaggccccccagggcccccttcatttcctggccctcacaggcagactatcagcgttcccggccctccgggcccccctgggccccctgggccccctggaaccatgggcgcctcctcaggggtgaggctctgggctacacgccaggccatgctgggccaggtgcacgaggttcccgagggctggctcatcttcgtggccgagcaggaggagctctacgtccgcgtgcagaacgggttccggaaggtccagctggaggcccggacaccactcccacgagggacggacaatgaagtggccgccttgcagccccccgtggtgcagctgcacgacagcaacccctacccgcggcgggagcacccccaccccaccgcgcggccctggcgggcagatgacatcctggccagcccccctcgcctgcccgagccccagccctaccccggagccccgcaccacagctcctacgtgcacctgcggccggcgcgacccacaagcccacccgcccacagccaccgcgacttccagccggtgctccacctggttgcgctcaacagccccctgtcaggcggcatgcggggcatccgcggggccgacttccagtgcttccagcaggcgcgggccgtggggctggcgggcaccttccgcgccttcctgtcctcgcgcctgcaggacctgtacagcatcgtgcgccgtgccgaccgcgcagccgtgcccatcgtcaacctcaaggacgagctgctgtttcccagctgggaggctctgttctcaggctctgagggtccgctgaagcccggggcacgcatcttctcctttgacggcaaggacgtcctgaggcaccccacctggccccagaagagcgtgtggcatggctcggaccccaacgggcgcaggctgaccgagagctactgtgagacgtggcggacggaggctccctcggccacgggccaggcctcctcgctgctggggggcaggctcctggggcagagtgccgcgagctgccatcacgcctacatcgtgctctgcattgagaacagcttcatgactgcctccaagtagccaccgcctggatgcggatggccggagaggaccggcggctcggaggaagcccccaccgtgggcagggagcggccggccagcccctggccccaggacctggctgccatactttcctgtatagttcacgtttcatgtaatcctcaagaaataaaaggaagccaaagagtgtatttttttaaaagtttaaaacagaagcctgatgctgacattcacctgccccaactctcccctgacctgtgagcccagctgggtcaggcagggtgcagtatcatgccctgtgcaacctcttggcctgatcagaccacggctcgatttctccaggatttcctgctttgggaagccgtgctcgccccagcaggtgctgacttcatctcccacctagcagcaccgttctgtgcacaaaacccagacctgttagcagacaggccccgtgaggcaatgggagctgaggccacactcagcacaaggccatctgggctcctccagggtgtgtgctcgccctgcggtagatgggagggaggctcaggtccctggggctagggggagccccttctgctcagctctgggccattctccacagcaaccccaggctgaagcaggttcccaagctcagaggcgcactgtgacccccagctccggcctgtcctccaacaccaagcacagcagcctggggctggcctcccaaatgagccatgagatgatacatccaaagcagacagctccaccctggccgagtccaagctgggagattcaagggacccatgagttggggtctggcagcctcccatccagggcccccatctcatgcccctggctgggacgtggctcagccagcacttgtccagctgagcgccaggatggaacacggccacatcaaagaggctgaggctggcacaggacatgcggtagccagcacacagggcagtgagggagggctgtcatctgtgcactgcccatggacaggctggctccagatgcagggcagtcattggctgtctcctaggaaacccatatccttaccctccttgggactgaaggggaaccccggggtgcccacaggccgccctgcgggtgaacaaagcagccacgaggtgcaacaaggtcctctgtcagtcacagccacccctgagatccggcaacatcaacccgagtcattcgttctgtggagggacaagtggactcagggcagcgccaggctgaccacagcacagccaacacgcacctgcctcaggactgcgacgaaaccggtggggctggttctgtaattgtgtgtgatgtgaagccaattcagacaggcaaataaaagtgaccttttacactgaaaaaaaaaaaaaaaaa

SEQ ID NO: 154 - DNA, 2722 bp, Homo sapiens
  gene (1)..(2722): Accession No. NM_005225
ttggcgcgtaaaagtggccgggactttgcaggcagcggcggccgggggcggagcgggatcgagccctcgccgaggcctgccgccatgggcccgcgccgccgccgccgcctgtcacccgggccgcgcgggccgtgagcgtcatggccttggccggggcccctgcgggcggcccatgcgcgccggcgctggaggccctgctcggggccggcgcgctgcggctgctcgactcctcgcagatcgtcatcatctccgccgcgcaggacgccagcgccccgccggctcccaccggccccgcggcgcccgccgccggcccctgcgaccctgacctgctgctcttcgccacaccgcaggcgccccggcccacacccagtgcgccgcggcccgcgctcggccgcccgccggtgaagcggaggctggacctggaaactgaccatcagtacctggccgagagcagtgggccagctcggggcagaggccgccatccaggaaaaggtgtgaaatccccgggggagaagtcacgctatgagacctcactgaatctgaccaccaagcgcttcctggagctgctgagccactcggctgacggtgtcgtcgacctgaactgggctgccgaggtgctgaaggtgcagaagcggcgcatctatgacatcaccaacgtccttgagggcatccagctcattgccaagaagtccaagaaccacatccagtggctgggcagccacaccacagtgggcgtcggcggacggcttgaggggttgacccaggacctccgacagctgcaggagagcgagcagcagctggaccacctgatgaatatctgtactacgcagctgcgcctgctctccgaggacactgacagccagcgcctggcctacgtgacgtgtcaggaccttcgtagcattgcagaccctgcagagcagatggttatggtgatcaaagcccctcctgagacccagctccaagccgtggactcttcggagaactttcagatctcccttaagagcaaacaaggcccgatcgatgttttcctgtgccctgaggagaccgtaggtgggatcagccctgggaagaccccatcccaggaggtcacttctgaggaggagaacagggccactgactctgccaccatagtgtcaccaccaccatcatctcccccctcatccctcaccacagatcccagccagtctctactcagcctggagcaagaaccgctgttgtcccggatgggcagcctgcgggctcccgtggacgaggaccgcctgtccccgctggtggcggccgactcgctcctggagcatgtgcgggaggacttctccggcctcctccctgaggagttcatcagcctttccccaccccacgaggccctcgactaccacttcggcctcgaggagggcgagggcatcagagacctcttcgactgtgactttggggacctcacccccctggatttctgacagggcttggagggaccagggtttccagagatgctcaccttgtctctgcagccctggagccccctgtccctggccgtcctcccagcctgtttggaaacatttaatttatacccctctcctctgtctccagaagcttctagctctggggtctggctaccgctaggaggctgagcaagccaggaagggaaggagtctgtgtggtgtgtatgtgcatgcagcctacacccacacgtgtgtaccgggggtgaatgtgtgtgagcatgtgtgtgtgcatgtaccggggaatgaaggtgaacatacacctctgtgtgtgcactgcagacacgccccagtgtgtccacatgtgtgtgcatgagtccatgtgtgcgcgtgggggggctctaactgcactttcggcccttttgctctgggggtcccacaaggcccagggcagtgcctgctcccagaatctggtgctctgaccaggccaggtggggaggctttggctggctgggcgtgtaggacggtgagagcacttctgtcttaaaggttttttctgattgaagctttaatggagcgttatttatttatcgaggcctctttggtgagcctggggaatcagcaaaggggaggaggggtgtggggttgataccccaactccctctacccttgagcaagggcaggggtccctgagctgttcttctgccccatactgaaggaactgaggcctgggtgatttatttattgggaaagtgagggagggagacagactgactgacagccatgggtggtcagatggtggggtgggccctctccagggggccagttcagggccccagctgccccccaggatggatatgagatgggagaggtgagtgggggaccttcactgatgtgggcaggaggggtggtgaaggcctcccccagcccagaccctgtggtccctcctgcagtgtctgaagcgcctgcctccccactgctctgccccaccctccaatctgcactttgatttgcttcctaacagctctgttccctcctgctttggttttaataaatattttgatgacgtttgggccgggttttgggactctgttgggaacatttcggggcgggagaggccaaggttgctggggaaatgcccattctccacttcccttctccctgtccgtgcccgatttgatttgagcctcataactcgaagaaaggtcagcttcctcgctgttttggtcctaactcaaaagcagatccagtaaaggtttttgttgtaaaaaaaaaaaaaaaaaaaaaaa

SEQ ID NO: 155 - DNA, 5616 bp, Homo sapiens
  gene (1)..(5616): Accession No. NM_005228
ccccggcgcagcgcggccgcagcagcctccgccccccgcacggtgtgagcgcccgacgcggccgaggcggccggagtcccgagctagccccggcggccgccgccgcccagaccggacgacaggccacctcgtcggcgtccgcccgagtccccgcctcgccgccaacgccacaaccaccgcgcacggccccctgactccgtccagtattgatcgggagagccggagcgagctcttcggggagcagcgatgcgaccctccgggacggccggggcagcgctcctggcgctgctggctgcgctctgcccggcgagtcgggctctggaggaaaagaaagtttgccaaggcacgagtaacaagctcacgcagttgggcacttttgaagatcattttctcagcctccagaggatgttcaataactgtgaggtggtccttgggaatttggaaattacctatgtgcagaggaattatgatctttccttcttaaagaccatccaggaggtggctggttatgtcctcattgccctcaacacagtggagcgaattcctttggaaaacctgcagatcatcagaggaaatatgtactacgaaaattcctatgccttagcagtcttatctaactatgatgcaaataaaaccggactgaaggagctgcccatgagaaatttacaggaaatcctgcatggcgccgtgcggttcagcaacaaccctgccctgtgcaacgtggagagcatccagtggcgggacatagtcagcagtgactttctcagcaacatgtcgatggacttccagaaccacctgggcagctgccaaaagtgtgatccaagctgtcccaatgggagctgctggggtgcaggagaggagaactgccagaaactgaccaaaatcatctgtgcccagcagtgctccgggcgctgccgtggcaagtcccccagtgactgctgccacaaccagtgtgctgcaggctgcacaggcccccgggagagcgactgcctggtctgccgcaaattccgagacgaagccacgtgcaaggacacctgccccccactcatgctctacaaccccaccacgtaccagatggatgtgaaccccgagggcaaatacagctttggtgccacctgcgtgaagaagtgtccccgtaattatgtggtgacagatcacggctcgtgcgtccgagcctgtggggccgacagctatgagatggaggaagacggcgtccgcaagtgtaagaagtgcgaagggccttgccgcaaagtgtgtaacggaataggtattggtgaatttaaagactcactctccataaatgctacgaatattaaacacttcaaaaactgcacctccatcagtggcgatctccacatcctgccggtggcatttaggggtgactccttcacacatactcctcctctggatccacaggaactggatattctgaaaaccgtaaaggaaatcacagggtttttgctgattcaggcttggcctgaaaacaggacggacctccatgcctttgagaacctagaaatcatacgcggcaggaccaagcaacatggtcagttttctcttgcagtcgtcagcctgaacataacatccttgggattacgctccctcaaggagataagtgatggagatgtgataatttcaggaaacaaaaatttgtgctatgcaaatacaataaactggaaaaaactgtttgggacctccggtcagaaaaccaaaattataagcaacagaggtgaaaacagctgcaaggccacaggccaggtctgccatgccttgtgctcccccgagggctgctggggcccggagcccagggactgcgtctcttgccggaatgtcagccgaggcagggaatgcgtggacaagtgcaaccttctggagggtgagccaagggagtttgtggagaactctgagtgcatacagtgccacccagagtgcctgcctcaggccatgaacatcacctgcacaggacggggaccagacaactgtatccagtgtgcccactacattgacggcccccactgcgtcaagacctgcccggcaggagtcatgggagaaaacaacaccctggtctggaagtacgcagacgccggccatgtgtgccacctgtgccatccaaactgcacctacggatgcactgggccaggtcttgaaggctgtccaacgaatgggcctaagatcccgtccatcgccactgggatggtgggggccctcctcttgctgctggtggtggccctggggatcggcctcttcatgcgaaggcgccacatcgttcggaagcgcacgctgcggaggctgctgcaggagagggagcttgtggagcctcttacacccagtggagaagctcccaaccaagctctcttgaggatcttgaaggaaactgaattcaaaaagatcaaagtgctgggctccggtgcgttcggcacggtgtataagggactctggatcccagaaggtgagaaagttaaaattcccgtcgctatcaaggaattaagagaagcaacatctccgaaagccaacaaggaaatcctcgatgaagcctacgtgatggccagcgtggacaacccccacgtgtgccgcctgctgggcatctgcctcacctccaccgtgcagctcatcacgcagctcatgcccttcggctgcctcctggactatgtccgggaacacaaagacaatattggctcccagtacctgctcaactggtgtgtgcagatcgcaaagggcatgaactacttggaggaccgtcgcttggtgcaccgcgacctggcagccaggaacgtactggtgaaaacaccgcagcatgtcaagatcacagattttgggctggccaaactgctgggtgcggaagagaaagaataccatgcagaaggaggcaaagtgcctatcaagtggatggcattggaatcaattttacacagaatctatacccaccagagtgatgtctggagctacggggtgaccgtttgggagttgatgacctttggatccaagccatatgacggaatccctgccagcgagatctcctccatcctggagaaaggagaacgcctccctcagccacccatatgtaccatcgatgtctacatgatcatggtcaagtgctggatgatagacgcagatagtcgcccaaagttccgtgagttgatcatcgaattctccaaaatggcccgagacccccagcgctaccttgtcattcagggggatgaaagaatgcatttgccaagtcctacagactccaacttctaccgtgccctgatggatgaagaagacatggacgacgtggtggatgccgacgagtacctcatcccacagcagggcttcttcagcagcccctccacgtcacggactcccctcctgagctctctgagtgcaaccagcaacaattccaccgtggcttgcattgatagaaatgggctgcaaagctgtcccatcaaggaagacagcttcttgcagcgatacagctcagaccccacaggcgccttgactgaggacagcatagacgacaccttcctcccagtgcctgaatacataaaccagtccgttcccaaaaggcccgctggctctgtgcagaatcctgtctatcacaatcagcctctgaaccccgcgcccagcagagacccacactaccaggacccccacagcactgcagtgggcaaccccgagtatctcaacactgtccagcccacctgtgtcaacagcacattcgacagccctgcccactgggcccagaaaggcagccaccaaattagcctggacaaccctgactaccagcaggacttctttcccaaggaagccaagccaaatggcatctttaagggctccacagctgaaaatgcagaatacctaagggtcgcgccacaaagcagtgaatttattggagcatgaccacggaggatagtatgagccctaaaaatccagactctttcgatacccaggaccaagccacagcaggtcctccatcccaacagccatgcccgcattagctcttagacccacagactggttttgcaacgtttacaccgactagccaggaagtacttccacctcgggcacattttgggaagttgcattcctttgtcttcaaactgtgaagcatttacagaaacgcatccagcaagaatattgtccctttgagcagaaatttatctttcaaagaggtatatttgaaaaaaaaaaaaagtatatgtgaggatttttattgattggggatcttggagtttttcattgtcgctattgatttttacttcaatgggctcttccaacaaggaagaagcttgctggtagcacttgctaccctgagttcatccaggcccaactgtgagcaaggagcacaagccacaagtcttccagaggatgcttgattccagtggttctgcttcaaggcttccactgcaaaacactaaagatccaagaaggccttcatggccccagcaggccggatcggtactgtatcaagtcatggcaggtacagtaggataagccactctgtcccttcctgggcaaagaagaaacggaggggatggaattcttccttagacttacttttgtaaaaatgtccccacggtacttactccccactgatggaccagtggtttccagtcatgagcgttagactgacttgtttgtcttccattccattgttttgaaactcagtatgctgcccctgtcttgctgtcatgaaatcagcaagagaggatgacacatcaaataataactcggattccagcccacattggattcatcagcatttggaccaatagcccacagctgagaatgtggaatacctaaggatagcaccgcttttgttctcgcaaaaacgtatctcctaatttgaggctcagatgaaatgcatcaggtcctttggggcatagatcagaagactacaaaaatgaagctgctctgaaatctcctttagccatcaccccaaccccccaaaattagtttgtgttacttatggaagatagttttctccttttacttcacttcaaaagctttttactcaaagagtatatgttccctccaggtcagctgcccccaaaccccctccttacgctttgtcacacaaaaagtgtctctgccttgagtcatctattcaagcacttacagctctggccacaacagggcattttacaggtgcgaatgacagtagcattatgagtagtgtggaattcaggtagtaaatatgaaactagggtttgaaattgataatgctttcacaacatttgcagatgttttagaaggaaaaaagttccttcctaaaataatttctctacaattggaagattggaagattcagctagttaggagcccaccttttttcctaatctgtgtgtgccctgtaacctgactggttaacagcagtcctttgtaaacagtgttttaaactctcctagtcaatatccaccccatccaatttatcaaggaagaaatggttcagaaaatattttcagcctacagttatgttcagtcacacacacatacaaaatgttccttttgcttttaaagtaatttttgactcccagatcagtcagagcccctacagcattgttaagaaagtatttgatttttgtctcaatgaaaataaaactatattcatttccactctaaaaaaaaaaaaaaaaa

SEQ ID NO: 156 - DNA, 2755 bp, Homo sapiens
  gene (1)..(2755): Accession No. NM_000043
cctacccgcgcgcaggccaagttgctgaatcaatggagccctccccaacccgggcgttccccagcgaggcttccttcccatcctcctgaccaccggggcttttcgtgagctcgtctctgatctcgcgcaagagtgacacacaggtgttcaaagacgcttctggggagtgagggaagcggtttacgagtgacttggctggagcctcaggggcgggcactggcacggaacacaccctgaggccagccctggctgcccaggcggagctgcctcttctcccgcgggttggtggacccgctcagtacggagttggggaagctctttcacttcggaggattgctcaacaaccatgctgggcatctggaccctcctacctctggttcttacgtctgttgctagattatcgtccaaaagtgttaatgcccaagtgactgacatcaactccaagggattggaattgaggaagactgttactacagttgagactcagaacttggaaggcctgcatcatgatggccaattctgccataagccctgtcctccaggtgaaaggaaagctagggactgcacagtcaatggggatgaaccagactgcgtgccctgccaagaagggaaggagtacacagacaaagcccatttttcttccaaatgcagaagatgtagattgtgtgatgaaggacatggcttagaagtggaaataaactgcacccggacccagaataccaagtgcagatgtaaaccaaactttttttgtaactctactgtatgtgaacactgtgacccttgcaccaaatgtgaacatggaatcatcaaggaatgcacactcaccagcaacaccaagtgcaaagaggaaggatccagatctaacttggggtggctttgtcttcttcttttgccaattccactaattgtttgggtgaagagaaaggaagtacagaaaacatgcagaaagcacagaaaggaaaaccaaggttctcatgaatctccaaccttaaatcctgaaacagtggcaataaatttatctgatgttgacttgagtaaatatatcaccactattgctggagtcatgacactaagtcaagttaaaggctttgttcgaaagaatggtgtcaatgaagccaaaatagatgagatcaagaatgacaatgtccaagacacagcagaacagaaagttcaactgcttcgtaattggcatcaacttcatggaaagaaagaagcgtatgacacattgattaaagatctcaaaaaagccaatctttgtactcttgcagagaaaattcagactatcatcctcaaggacattactagtgactcagaaaattcaaacttcagaaatgaaatccaaagcttggtctagagtgaaaaacaacaaattcagttctgagtatatgcaattagtgtttgaaaagattcttaatagctggctgtaaatactgcttggttttttactgggtacattttatcatttattagcgctgaagagccaacatatttgtagatttttaatatctcatgattctgcctccaaggatgtttaaaatctagttgggaaaacaaacttcatcaagagtaaatgcagtggcatgctaagtacccaaataggagtgtatgcagaggatgaaagattaagattatgctctggcatctaacatatgattctgtagtatgaatgtaatcagtgtatgttagtacaaatgtctatccacaggctaaccccactctatgaatcaatagaagaagctatgaccttttgctgaaatatcagttactgaacaggcaggccactttgcctctaaattacctctgataattctagagattttaccatatttctaaactttgtttataactctgagaagatcatatttatgtaaagtatatgtatttgagtgcagaatttaaataaggctctacctcaaagacctttgcacagtttattggtgtcatattatacaatatttcaattgtgaattcacatagaaaacattaaattataatgtttgactattatatatgtgtatgcattttactggctcaaaactacctacttctttctcaggcatcaaaagcattttgagcaggagagtattactagagctttgccacctctccatttttgccttggtgctcatcttaatggcctaatgcacccccaaacatggaaatatcaccaaaaaatacttaatagtccaccaaaaggcaagactgcccttagaaattctagcctggtttggagatactaactgctctcagagaaagtagctttgtgacatgtcatgaacccatgtttgcaatcaaagatgataaaatagattcttatttttcccccacccccgaaaatgttcaataatgtcccatgtaaaacctgctacaaatggcagcttatacatagcaatggtaaaatcatcatctggatttaggaattgctcttgtcatacccccaagtttctaagatttaagattctccttactactatcctacgtttaaatatctttgaaagtttgtattaaatgtgaattttaagaaataatatttatatttctgtaaatgtaaactgtgaagatagttataaactgaagcagatacctggaaccacctaaagaacttccatttatggaggatttttttgccccttgtgtttggaattataaaatataggtaaaagtacgtaattaaataatgtttttggtaaaaaaaaaaaaaaaaaaaaaaaaaaaaaaaaaaaaaaaaaaaaaaaaaaaaaaaaaaaaaaaaaaa

SEQ ID NO: 157 - DNA, 4654 bp, Homo sapiens
  gene (1)..(4654): Accession No. NM_000141
ggcggcggctggaggagagcgcggtggagagccgagcgggcgggcggcgggtgcggagcgggcgagggagcgcgcgcggccgccacaaagctcgggcgccgcggggctgcatgcggcgtacctggcccggcgcggcgactgctctccgggctggcgggggccggccgcgagccccgggggccccgaggccgcagcttgcctgcgcgctctgagccttcgcaactcgcgagcaaagtttggtggaggcaacgccaagcctgagtcctttcttcctctcgttccccaaatccgagggcagcccgcgggcgtcatgcccgcgctcctccgcagcctggggtacgcgtgaagcccgggaggcttggcgccggcgaagacccaaggaccactcttctgcgtttggagttgctccccgcaaccccgggctcgtcgctttctccatcccgacccacgcggggcgcggggacaacacaggtcgcggaggagcgttgccattcaagtgactgcagcagcagcggcagcgcctcggttcctgagcccaccgcaggctgaaggcattgcgcgtagtccatgcccgtagaggaagtgtgcagatgggattaacgtccacatggagatatggaagaggaccggggattggtaccgtaaccatggtcagctggggtcgtttcatctgcctggtcgtggtcaccatggcaaccttgtccctggcccggccctccttcagtttagttgaggataccacattagagccagaagagccaccaaccaaataccaaatctctcaaccagaagtgtacgtggctgcgccaggggagtcgctagaggtgcgctgcctgttgaaagatgccgccgtgatcagttggactaaggatggggtgcacttggggcccaacaataggacagtgcttattggggagtacttgcagataaagggcgccacgcctagagactccggcctctatgcttgtactgccagtaggactgtagacagtgaaacttggtacttcatggtgaatgtcacagatgccatctcatccggagatgatgaggatgacaccgatggtgcggaagattttgtcagtgagaacagtaacaacaagagagcaccatactggaccaacacagaaaagatggaaaagcggctccatgctgtgcctgcggccaacactgtcaagtttcgctgcccagccggggggaacccaatgccaaccatgcggtggctgaaaaacgggaaggagtttaagcaggagcatcgcattggaggctacaaggtacgaaaccagcactggagcctcattatggaaagtgtggtcccatctgacaagggaaattatacctgtgtagtggagaatgaatacgggtccatcaatcacacgtaccacctggatgttgtggagcgatcgcctcaccggcccatcctccaagccggactgccggcaaatgcctccacagtggtcggaggagacgtagagtttgtctgcaaggtttacagtgatgcccagccccacatccagtggatcaagcacgtggaaaagaacggcagtaaatacgggcccgacgggctgccctacctcaaggttctcaaggccgccggtgttaacaccacggacaaagagattgaggttctctatattcggaatgtaacttttgaggacgctggggaatatacgtgcttggcgggtaattctattgggatatcctttcactctgcatggttgacagttctgccagcgcctggaagagaaaaggagattacagcttccccagactacctggagatagccatttactgcataggggtcttcttaatcgcctgtatggtggtaacagtcatcctgtgccgaatgaagaacacgaccaagaagccagacttcagcagccagccggctgtgcacaagctgaccaaacgtatccccctgcggagacaggtaacagtttcggctgagtccagctcctccatgaactccaacaccccgctggtgaggataacaacacgcctctcttcaacggcagacacccccatgctggcaggggtctccgagtatgaacttccagaggacccaaaatgggagtttccaagagataagctgacactgggcaagcccctgggagaaggttgctttgggcaagtggtcatggcggaagcagtgggaattgacaaagacaagcccaaggaggcggtcaccgtggccgtgaagatgttgaaagatgatgccacagagaaagacctttctgatctggtgtcagagatggagatgatgaagatgattgggaaacacaagaatatcataaatcttcttggagcctgcacacaggatgggcctctctatgtcatagttgagtatgcctctaaaggcaacctccgagaatacctccgagcccggaggccacccgggatggagtactcctatgacattaaccgtgttcctgaggagcagatgaccttcaaggacttggtgtcatgcacctaccagctggccagaggcatggagtacttggcttcccaaaaatgtattcatcgagatttagcagccagaaatgttttggtaacagaaaacaatgtgatgaaaatagcagactttggactcgccagagatatcaacaatatagactattacaaaaagaccaccaatgggcggcttccagtcaagtggatggctccagaagccctgtttgatagagtatacactcatcagagtgatgtctggtccttcggggtgttaatgtgggagatcttcactttagggggctcgccctacccagggattcccgtggaggaactttttaagctgctgaaggaaggacacagaatggataagccagccaactgcaccaacgaactgtacatgatgatgagggactgttggcatgcagtgccctcccagagaccaacgttcaagcagttggtagaagacttggatcgaattctcactctcacaaccaatgaggaatacttggacctcagccaacctctcgaacagtattcacctagttaccctgacacaagaagttcttgttcttcaggagatgattctgttttttctccagaccccatgccttacgaaccatgccttcctcagtatccacacataaacggcagtgttaaaacatgaatgactgtgtctgcctgtccccaaacaggacagcactgggaacctagctacactgagcagggagaccatgcctcccagagcttgttgtctccacttgtatatatggatcagaggagtaaataattggaaaagtaatcagcatatgtgtaaagatttatacagttgaaaacttgtaatcttccccaggaggagaagaaggtttctggagcagtggactgccacaagccaccatgtaacccctctcacctgccgtgcgtactggctgtggaccagtaggactcaaggtggacgtgcgttctgccttccttgttaattttgtaataattggagaagatttatgtcagcacacacttacagagcacaaatgcagtatataggtgctggatgtatgtaaatatattcaaattatgtataaatatatattatatatttacaaggagttattttttgtattgattttaaatggatgtcccaatgcacctagaaaattggtctctctttttttaatagctatttgctaaatgctgttcttacacataatttcttaattttcaccgagcagaggtggaaaaatacttttgctttcagggaaaatggtataacgttaatttattaataaattggtaatatacaaaacaattaatcatttatagttttttttgtaatttaagtggcatttctatgcaggcagcacagcagactagttaatctattgcttggacttaactagttatcagatcctttgaaaagagaatatttacaatatatgactaatttggggaaaatgaagttttgatttatttgtgtttaaatgctgctgtcagacgattgttcttagacctcctaaatgccccatattaaaagaactcattcataggaaggtgtttcattttggtgtgcaaccctgtcattacgtcaacgcaacgtctaactggacttcccaagataaatggtaccagcgtcctcttaaaagatgccttaatccattccttgaggacagaccttagttgaaatgatagcagaatgtgcttctctctggcagctggccttctgcttctgagttgcacattaatcagattagcctgtattctcttcagtgaattttgataatggcttccagactctttggcgttggagacgcctgttaggatcttcaagtcccatcatagaaaattgaaacacagagttgttctgctgatagttttggggatacgtccatctttttaagggattgctttcatctaattctggcaggacctcaccaaaagatccagcctcatacctacatcagacaaaatatcgccgttgttccttctgtactaaagtattgtgttttgctttggaaacacccactcactttgcaatagccgtgcaagatgaatgcagattacactgatcttatgtgttacaaaattggagaaagtatttaataaaacctgttaatttttatactgacaataaaaatgtttctacagatattaatgttaacaagacaaaataaatgtcacgcaacttatttttttaataaaaaaaaaaaaaaa

SEQ ID NO: 158 - DNA, 2158 bp, Homo sapiens
  gene (1)..(2158): Accession No. NM_005252
attcataaaacgcttgttataaaagcagtggctgcggcgcctcgtactccaaccgcatctgcagcgagcatctgagaagccaagactgagccggcggccgcggcgcagcgaacgagcagtgaccgtgctcctacccagctctgctccacagcgcccacctgtctccgcccctcggcccctcgcccggctttgcctaaccgccacgatgatgttctcgggcttcaacgcagactacgaggcgtcatcctcccgctgcagcagcgcgtccccggccggggatagcctctcttactaccactcacccgcagactccttctccagcatgggctcgcctgtcaacgcgcaggacttctgcacggacctggccgtctccagtgccaacttcattcccacggtcactgccatctcgaccagtccggacctgcagtggctggtgcagcccgccctcgtctcctccgtggccccatcgcagaccagagcccctcaccctttcggagtccccgccccctccgctggggcttactccagggctggcgttgtgaagaccatgacaggaggccgagcgcagagcattggcaggaggggcaaggtggaacagttatctccagaagaagaagagaaaaggagaatccgaagggaaaggaataagatggctgcagccaaatgccgcaaccggaggagggagctgactgatacactccaagcggagacagaccaactagaagatgagaagtctgctttgcagaccgagattgccaacctgctgaaggagaaggaaaaactagagttcatcctggcagctcaccgacctgcctgcaagatccctgatgacctgggcttcccagaagagatgtctgtggcttcccttgatctgactgggggcctgccagaggttgccaccccggagtctgaggaggccttcaccctgcctctcctcaatgaccctgagcccaagccctcagtggaacctgtcaagagcatcagcagcatggagctgaagaccgagccctttgatgacttcctgttcccagcatcatccaggcccagtggctctgagacagcccgctccgtgccagacatggacctatctgggtccttctatgcagcagactgggagcctctgcacagtggctccctggggatggggcccatggccacagagctggagcccctgtgcactccggtggtcacctgtactcccagctgcactgcttacacgtcttccttcgtcttcacctaccccgaggctgactccttccccagctgtgcagctgcccaccgcaagggcagcagcagcaatgagccttcctctgactcgctcagctcacccacgctgctggccctgtgagggggcagggaaggggaggcagccggcacccacaagtgccactgcccgagctggtgcattacagagaggagaaacacatcttccctagagggttcctgtagacctagggaggaccttatctgtgcgtgaaacacaccaggctgtgggcctcaaggacttgaaagcatccatgtgtggactcaagtccttacctcttccggagatgtagcaaaacgcatggagtgtgtattgttcccagtgacacttcagagagctggtagttagtagcatgttgagccaggcctgggtctgtgtctcttttctctttctccttagtcttctcatagcattaactaatctattgggttcattattggaattaacctggtgctggatattttcaaattgtatctagtgcagctgattttaacaataactactgtgttcctggcaatagtgtgttctgattagaaatgaccaatattatactaagaaaagatacgactttattttctggtagatagaaataaatagctatatccatgtactgtagtttttcttcaacatcaatgttcattgtaatgttactgatcatgcattgttgaggtggtctgaatgttctgacattaacagttttccatgaaaacgttttattgtgtttttaatttatttattaagatggattctcagatatttatatttttattttatttttttctaccttgaggtcttttgacatgtggaaagtgaatttgaatgaaaaatttaagcattgtttgcttattgttccaagacattgtcaataaaagcatttaagttgaatgcgaccaa

SEQ ID NO: 159 - DNA, 913 bp, Homo sapiens
  gene (1)..(913): Accession No. NM_006144
agattttcaggttgattgatgtgggacagcagccacaatgaggaactcctatagatttctggcatcctctctctcagttgtcgtttctctcctgctaattcctgaagatgtctgtgaaaaaattattggaggaaatgaagtaactcctcattcaagaccctacatggtcctacttagtcttgacagaaaaaccatctgtgctggggctttgattgcaaaagactgggtgttgactgcagctcactgtaacttgaacaaaaggtcccaggtcattcttggggctcactcaataaccagggaagagccaacaaaacagataatgcttgttaagaaagagtttccctatccatgctatgacccagccacacgcgaaggtgaccttaaacttttacagctgacggaaaaagcaaaaattaacaaatatgtgactatccttcatctacctaaaaagggggatgatgtgaaaccaggaaccatgtgccaagttgcagggtggggcaggactcacaatagtgcatcttggtccgatactctgagagaagtcaatatcaccatcatagacagaaaagtctgcaatgatcgaaatcactataattttaaccctgtgattggaatgaatatggtttgtgctggaagcctccgaggtggaagagactcgtgcaatggagattctggaagccctttgttgtgcgagggtgttttccgaggggtcacttcctttggccttgaaaataaatgcggagaccctcgtgggcctggtgtctatattcttctctcaaagaaacacctcaactggataattatgactatcaagggagcagtttaaataaccgtttcctttcatttactgtggcttcttaatcttttcacaaataaaatcaatttgcatgactgtaaaaaaaaaaaaaaaaaa

SEQ ID NO: 160 - DNA, 1061 bp, Homo sapiens
  gene (1)..(1061): Accession No. NM_005343
tgccctgcgcccgcaacccgagccgcacccgccgcggacggagcccatgcgcggggcgaaccgcgcgcccccgcccccgccccgccccggcctcggccccggccctggccccgggggcagtcgcgcctgtgaacggtggggcaggagaccctgtaggaggaccccgggccgcaggcccctgaggagcgatgacggaatataagctggtggtggtgggcgccggcggtgtgggcaagagtgcgctgaccatccagctgatccagaaccattttgtggacgaatacgaccccactatagaggattcctaccggaagcaggtggtcattgatggggagacgtgcctgttggacatcctggataccgccggccaggaggagtacagcgccatgcgggaccagtacatgcgcaccggggagggcttcctgtgtgtgtttgccatcaacaacaccaagtcttttgaggacatccaccagtacagggagcagatcaaacgggtgaaggactcggatgacgtgcccatggtgctggtggggaacaagtgtgacctggctgcacgcactgtggaatctcggcaggctcaggacctcgcccgaagctacggcatcccctacatcgagacctcggccaagacccggcagggagtggaggatgccttctacacgttggtgcgtgagatccggcagcacaagctgcggaagctgaaccctcctgatgagagtggccccggctgcatgagctgcaagtgtgtgctctcctgacgcagcacaagctcaggacatggaggtgccggatgcaggaaggaggtgcagacggaaggaggaggaaggaaggacggaagcaaggaaggaaggaagggctgctggagcccagtcaccccgggaccgtgggccgaggtgactgcagaccctcccagggaggctgtgcacagactgtcttgaacatcccaaatgccaccggaaccccagcccttagctcccctcccaggcctctgtgggcccttgtcgggcacagatgggatcacagtaaattattggatggtcttgaaaaaaaaaaaaaaaaaa

SEQ ID NO: 161 - DNA, 836 bp, Homo sapiens
  gene (1)..(836): Accession No. NM_002038
ccagccttcagccggagaaccgtttactcgctgctgtgcccatctatcagcaggctccgggctgaagattgcttctcttctctcctccaaggtctagtgacggagcccgcgcgcggcgccaccatgcggcagaaggcggtatcgcttttcttgtgctacctgctgctcttcacttgcagtggggtggaggcaggtaagaaaaagtgctcggagagctcggacagcggctccgggttctggaaggccctgaccttcatggccgtcggaggaggactcgcagtcgccgggctgcccgcgctgggcttcaccggcgccggcatcgcggccaactcggtggctgcctcgctgatgagctggtctgcgatcctgaatgggggcggcgtgcccgccggggggctagtggccacgctgcagagcctcggggctggtggcagcagcgtcgtcataggtaatattggtgccctgatgggctacgccacccacaagtatctcgatagtgaggaggatgaggagtagccagcagctcccagaacctcttcttccttcttggcctaactcttccagttaggatctagaactttgcctttttttttttttttttttttttgagatgggttctcactatattgtccaggctagagtgcagtggctattcacagatgcgaacatagtacactgcagcctccaactcctagcctcaagtgatcctcctgtctcaacctcccaagtaggattacaagcatgcgccgacgatgcccagaatccagaactttgtctatcactctccccaacaacctagatgtgaaaacagaataaacttcacccagaaaacactt

SEQ ID NO: 162 - DNA, 733 bp, Homo sapiens
  gene (1)..(733): Accession No. NM_003641
aaacagcaggaaatagaaacttaagagaaatacacacttctgagaaactgaaacgacaggggaaaggaggtctcactgagcaccgtcccagcatccggacaccacagcggcccttcgctccacgcagaaaaccacacttctcaaaccttcactcaacacttccttccccaaagccagaagatgcacaaggaggaacatgaggtggctgtgctgggggcaccccccagcaccatccttccaaggtccaccgtgatcaacatccacagcgagacctccgtgcccgaccatgtcgtctggtccctgttcaacaccctcttcttgaactggtgctgtctgggcttcatagcattcgcctactccgtgaagtctagggacaggaagatggttggcgacgtgaccggggcccaggcctatgcctccaccgccaagtgcctgaacatctgggccctgattctgggcatcctcatgaccattggattcatcctgttactggtattcggctctgtgacagtctaccatattatgttacagataatacaggaaaaacggggttactagtagccgcccatagcctgcaacctttgcactccactgtgcaatgctggccctgcacgctggggctgttgcccctgcccccttggtcctgcccctagatacagcagtttatacccacacacctgtctacagtgtcattcaataaagtgcacgtgcttgtgaaaaaaaaaaaaaaaaa

SEQ ID NO: 163 - DNA, 7321 bp, Homo sapiens
  gene (1)..(7321): Accession No. NM_000618
ttttgtagataaatgtgaggattttctctaaatccctcttctgtttgctaaatctcactgtcactgctaaattcagagcagatagagcctgcgcaatggaataaagtcctcaaaattgaaatgtgacattgctctcaacatctcccatctctctggatttctttttgcttcattattcctgctaaccaattcattttcagactttgtacttcagaagcaatgggaaaaatcagcagtcttccaacccaattatttaagtgctgcttttgtgatttcttgaaggtgaagatgcacaccatgtcctcctcgcatctcttctacctggcgctgtgcctgctcaccttcaccagctctgccacggctggaccggagacgctctgcggggctgagctggtggatgctcttcagttcgtgtgtggagacaggggcttttatttcaacaagcccacagggtatggctccagcagtcggagggcgcctcagacaggcatcgtggatgagtgctgcttccggagctgtgatctaaggaggctggagatgtattgcgcacccctcaagcctgccaagtcagctcgctctgtccgtgcccagcgccacaccgacatgcccaagacccagaaggaagtacatttgaagaacgcaagtagagggagtgcaggaaacaagaactacaggatgtaggaagaccctcctgaggagtgaagagtgacatgccaccgcaggatcctttgctctgcacgagttacctgttaaactttggaacacctaccaaaaaataagtttgataacatttaaaagatgggcgtttcccccaatgaaatacacaagtaaacattccaacattgtctttaggagtgatttgcaccttgcaaaaatggtcctggagttggtagattgctgttgatcttttatcaataatgttctatagaaaagaaaaaaaaaatatatatatatatatatcttagtccctgcctctcaagagccacaaatgcatgggtgttgtatagatccagttgcactaaattcctctctgaatcttggctgctggagccattcattcagcaaccttgtctaagtggtttatgaattgtttccttatttgcacttctttctacacaactcgggctgtttgttttacagtgtctgataatcttgttagtctatacccaccacctcccttcataacctttatatttgccgaatttggcctcctcaaaagcagcagcaagtcgtcaagaagcacaccaattctaacccacaagattccatctgtggcatttgtaccaaatataagttggatgcattttattttagacacaaagctttatttttccacatcatgcttacaaaaaagaataatgcaaatagttgcaactttgaggccaatcatttttaggcatatgttttaaacatagaaagtttcttcaactcaaaagagttccttcaaatgatgagttaatgtgcaacctaattagtaactttcctctttttattttttccatatagagcactatgtaaatttagcatatcaattatacaggatatatcaaacagtatgtaaaactctgttttttagtataatggtgctattttgtagtttgttatatgaaagagtctggccaaaacggtaatacgtgaaagcaaaacaataggggaagcctggagccaaagatgacacaaggggaagggtactgaaaacaccatccatttgggaaagaaggcaaagtccccccagttatgccttccaagaggaacttcagacacaaaagtccactgatgcaaattggactggcgagtccagagaggaaactgtggaatggaaaaagcagaaggctaggaattttagcagtcctggtttctttttctcatggaagaaatgaacatctgccagctgtgtcatggactcaccactgtgtgaccttgggcaagtcacttcacctctctgtgcctcagtttcctcatctgcaaaatgggggcaatatgtcatctacctacctcaaaggggtggtataaggtttaaaaagataaagattcagattttttttaccctgggttgctgtaagggtgcaacatcagggcgcttgagttgctgagatgcaaggaattctataaataacccattcatagcatagctagagattggtgaattgaatgctcctgacatctcagttcttgtcagtgaagctatccaaataactggccaactagttgttaaaagctaacagctcaatctcttaaaacacttttcaaaatatgtgggaagcatttgattttcaatttgattttgaattctgcatttggttttatgaatacaaagataagtgaaaagagagaaaggaaaagaaaaaggagaaaaacaaagagatttctaccagtgaaaggggaattaattactctttgttagcactcactgactcttctatgcagttactacatatctagtaaaacctcgtttaatactataaataatattctattcattttgaaaaacacaatgattccttcttttctaggcaatataaggaaagtgatccaaaatttgaaatattaaaataatatctaataaaaagtcacaaagttatcttctttaacaaactttactcttattcttagctgtatatacatttttttaaaagtttgttaaaatatgcttgactagagtttccagttgaaaggcaaaaacttccatcacaacaagaaatttcccatgcctgctcagaagggtagcccctagctctctgtgaatgtgttttatccattcaactgaaaattggtatcaagaaagtccactggttagtgtactagtccatcatagcctagaaaatgatccctatctgcagatcaagattttctcattagaacaatgaattatccagcattcagatctttctagtcaccttagaactttttggttaaaagtacccaggcttgattatttcatgcaaattctatattttacattcttggaaagtctatatgaaaaacaaaaataacatcttcagtttttctcccactgggtcacctcaaggatcagaggccaggaaaaaaaaaaaaaagactccctggatctctgaatatatgcaaaaagaaggccccatttagtggagccagcaatcctgttcagtcaacaagtattttaactctcagtccaacattatttgaattgagcacctcaagcatgcttagcaatgttctaatcactatggacagatgtaaaagaaactatacatcatttttgccctctgcctgttttccagacatacaggttctgtggaataagatactggactcctcttcccaagatggcacttctttttatttcttgtccccagtgtgtaccttttaaaattattccctctcaacaaaactttataggcagtcttctgcagacttaacgtgttttctgtcatagttagatgtgataattctaagagtgtctatgacttatttccttcacttaattctatccacagtcaaaaatcccccaaggaggaaagctgaaagatgcactgccatattatctttcttaactttttccaacacataatcctctccaactggattataaataaattgaaaataactcattataccaattcactattttattttttaatgaattaaaactagaaaacaaattgatgcaaaccctggaagtcagttgattactatatactacagcagaatgactcagatttcatagaaaggagcaaccaaaatgtcacaacccaaaactttacaagctttgcttcagaattagattgctttataattcttgaatgaggcaatttcaagatatttgtaaaagaacagtaaacattggtaagaatgagctttcaactcataggcttatttccaatttaattgaccatactggatacttaggtcaaatttctgttctctcttccccaaataatattaaagtattatttgaactttttaagatgaggcagttcccctgaaaaagttaatgcagctctccatcagaatccactcttctagggatatgaaaatctcttaacacccaccctacatacacagacacacacacacacacacacacacacacacacacacacattcaccctaaggatccaatggaatactgaaaagaaatcacttccttgaaaattttattaaaaaacaaacaaacaaacaaaaagcctgtccacccttgagaatccttcctctccttggaacgtcaatgtttgtgtagatgaaaccatctcatgctctgtggctccagggtttctgttactattttatgcacttgggagaaggcttagaataaaagatgtagcacattttgctttcccatttattgtttggccagctatgccaatgtggtgctattgtttctttaagaaagtacttgactaaaaaaaaaagaaaaaaagaaaaaaaagaaagcatagacatatttttttaaagtataaaaacaacaattctatagatagatggcttaataaaatagcattaggtctatctagccaccaccacctttcaactttttatcactcacaagtagtgtactgttcaccaaattgtgaatttgggggtgcaggggcaggagttggaaattttttaaagttagaaggctccattgttttgttggctctcaaacttagcaaaattagcaatatattatccaatcttctgaacttgatcaagagcatggagaataaacgcgggaaaaaagatcttataggcaaatagaagaatttaaaagataagtaagttccttattgatttttgtgcactctgctctaaaacagatattcagcaagtggagaaaataagaacaaagagaaaaaatacatagatttacctgcaaaaaatagcttctgccaaatcccccttgggtattctttggcatttactggtttatagaagacattctcccttcacccagacatctcaaagagcagtagctctcatgaaaagcaatcactgatctcatttgggaaatgttggaaagtatttccttatgagatgggggttatctactgataaagaaagaatttatgagaaattgttgaaagagatggctaacaatctgtgaagattttttgtttcttgtttttgttttttttttttttttactttatacagtctttatgaatttcttaatgttcaaaatgacttggttcttttcttctttttttatatcagaatgaggaataataagttaaacccacatagactctttaaaactataggctagatagaaatgtatgtttgacttgttgaagctataatcagactatttaaaatgttttgctatttttaatcttaaaagattgtgctaatttattagagcagaacctgtttggctctcctcagaagaaagaatctttccattcaaatcacatggctttccaccaatattttcaaaagataaatctgatttatgcaatggcatcatttattttaaaacagaagaattgtgaaagtttatgcccctcccttgcaaagaccataaagtccagatctggtaggggggcaacaacaaaaggaaaatgttgttgattcttggttttggattttgttttgttttcaatgctagtgtttaatcctgtagtacatatttgcttattgctattttaatattttataagaccttcctgttaggtattagaaagtgatacatagatatcttttttgtgtaatttctatttaaaaaagagagaagactgtcagaagctttaagtgcatatggtacaggataaagatatcaatttaaataaccaattcctatctggaacaatgcttttgttttttaaagaaacctctcacagataagacagaggcccaggggatttttgaagctgtctttattctgcccccatcccaacccagcccttattattttagtatctgcctcagaattttatagagggctgaccaagctgaaactctagaattaaaggaacctcactgaaaacatatatttcacgtgttccctctttttttttttcctttttgtgagatggggtctcgcactgtcccccaggctggagtgcagtggcatgatctcggctcactgcaacctccacctcctgggtttaagcgattctcctgcctcagcctcctgagtagctgggattacaggcacccaccactatgcccggctaattttttggatttttaatagagacggggttttaccatgttggccaggttggtctcaaactcctgaccttgtgatttgcccgcctcagcctcccaaattgctgggattacaggcatgagccaccacaccctgcccatgtgttccctcttaatgtatgattacatggatcttaaacatgatccttctctcctcattcttcaactatctttgatggggtctttcaaggggaaaaaaatccaagcttttttaaagtaaaaaaaaaaaaagagaggacacaaaaccaaatgttactgctcaactgaaatatgagttaagatggagacagagtttctcctaataaccggagctgaattacctttcactttcaaaaacatgaccttccacaatccttagaatctgcctttttttatattactgaggcctaaaagtaaacattactcattttattttgcccaaaatgcactgatgtaaagtaggaaaaataaaaacagagctctaaaatccctttcaagccacccattgaccccactcaccaactcatagcaaagtcacttctgttaatcccttaatctgattttgtttggatatttatcttgtacccgctgctaaacacactgcaggagggactctgaaacctcaagctgtctacttacatcttttatctgtgtctgtgtatcatgaaaatgtctattcaaaatatcaaaacctttcaaatatcacgcagcttatattcagtttacataaaggccccaaataccatgtcagatctttttggtaaaagagttaatgaactatgagaattgggattacatcatgtattttgcctcatgtatttttatcacacttataggccaagtgtgataaataaacttacagacactgaattaatttcccctgctactttgaaaccagaaaataatgactggccattcgttacatctgtcttagttgaaaagcatattttttattaaattaattctgattgtatttgaaattattattcaattcacttatggcagaggaatatcaatcctaatgacttctaaaaatgtaactaattgaatcattatcttacatttactgtttaataagcatattttgaaaatgtatggctagagtgtcataataaaatggtatatctttctttagtaattacattaaaattagtcatgtttgattaattagttc

SEQ ID NO: 164 - DNA, 2638 bp, Homo sapiens
  gene (1)..(2638): Accession No. NM_001013398
agatgcgagcactgcggctgggcgctgaggatcagccgcttcctgcctggattccacagcttcgcgccgtgtactgtcgccccatccctgcgcgcccagcctgccaagcagcgtgccccggttgcaggcgtcatgcagcgggcgcgacccacgctctgggccgctgcgctgactctgctggtgctgctccgcgggccgccggtggcgcgggctggcgcgagctcggcgggcttgggtcccgtggtgcgctgcgagccgtgcgacgcgcgtgcactggcccagtgcgcgcctccgcccgccgtgtgcgcggagctggtgcgcgagccgggctgcggctgctgcctgacgtgcgcactgagcgagggccagccgtgcggcatctacaccgagcgctgtggctccggccttcgctgccagccgtcgcccgacgaggcgcgaccgctgcaggcgctgctggacggccgcgggctctgcgtcaacgctagtgccgtcagccgcctgcgcgcctacctgctgccagcgccgccagctccaggtgagccgcccgcgccaggaaatgctagtgagtcggaggaagaccgcagcgccggcagtgtggagagcccgtccgtctccagcacgcaccgggtgtctgatcccaagttccaccccctccattcaaagataatcatcatcaagaaagggcatgctaaagacagccagcgctacaaagttgactacgagtctcagagcacagatacccagaacttctcctccgagtccaagcgggagacagaatatggtccctgccgtagagaaatggaagacacactgaatcacctgaagttcctcaatgtgctgagtcccaggggtgtacacattcccaactgtgacaagaagggattttataagaaaaagcagtgtcgcccttccaaaggcaggaagcggggcttctgctggtgtgtggataagtatgggcagcctctcccaggctacaccaccaaggggaaggaggacgtgcactgctacagcatgcagagcaagtagacgcctgccgcaaggttaatgtggagctcaaatatgccttattttgcacaaaagactgccaaggacatgaccagcagctggctacagcctcgatttatatttctgtttgtggtgaactgattttttttaaaccaaagtttagaaagaggtttttgaaatgcctatggtttctttgaatggtaaacttgagcatcttttcactttccagtagtcagcaaagagcagtttgaattttcttgtcgcttcctatcaaaatattcagagactcgagcacagcacccagacttcatgcgcccgtggaatgctcaccacatgttggtcgaagcggccgaccactgactttgtgacttaggcggctgtgttgcctatgtagagaacacgcttcacccccactccccgtacagtgcgcacaggctttatcgagaataggaaaacctttaaaccccggtcatccggacatcccaacgcatgctcctggagctcacagccttctgtggtgtcatttctgaaacaagggcgtggatccctcaaccaagaagaatgtttatgtcttcaagtgacctgtactgcttggggactattggagaaaataaggtggagtcctacttgtttaaaaaatatgtatctaagaatgttctagggcactctgggaacctataaaggcaggtatttcgggccctcctcttcaggaatcttcctgaagacatggcccagtcgaaggcccaggatggcttttgctgcggccccgtggggtaggagggacagagagacagggagagtcagcctccacattcagaggcatcacaagtaatggcacaattcttcggatgactgcagaaaatagtgttttgtagttcaacaactcaagacgaagcttatttctgaggataagctctttaaaggcaaagctttattttcatctctcatcttttgtcctccttagcacaatgtaaaaaagaatagtaatatcagaacaggaaggaggaatggcttgctggggagcccatccaggacactgggagcacatagagattcacccatgtttgttgaacttagagtcattctcatgcttttctttataattcacacatatatgcagagaagatatgttcttgttaacattgtatacaacatagccccaaatatagtaagatctatactagataatcctagatgaaatgttagagatgctatatgatacaactgtggccatgactgaggaaaggagctcacgcccagagactgggctgctctcccggaggccaaacccaagaaggtctggcaaagtcaggctcagggagactctgccctgctgcagacctcggtgtggacacacgctgcatagagctctccttgaaaacagaggggtctcaagacattctgcctacctattagcttttctttatttttttaactttttggggggaaaagtatttttgagaagtttgtcttgcaatgtatttataaatagtaaataaagtttttaccattaaaaaaatatctttccctttgttattgaccatctctgggctttgtatcactaattattttattttattatataataattattttattataataaaatcctgaaaggggaaaataaaaaaaa

SEQ ID NO: 165 - DNA, 4811 bp, Homo sapiens
  gene (1)..(4811): Accession No. NM_181501
ggtcctgccctgcgaaccagcgcggccccctggcgctgaggctgctccggccatggcccctcggccccgcgcccgcccaggggtcgctgtcgcctgctgctggctcctcactgttgttctacgctgctgcgtatcattcaatgttgatgtgaaaaattcaatgactttcagcggcccggtggaagacatgtttggatatactgttcaacaatatgaaaatgaagaaggaaaatgggtgcttattggttctccgttagttggccaacccaaaaacagaactggagatgtctataagtgtccagttgggagaggtgaatcattaccttgtgtaaagttggatctaccagttaatacatcaattcccaatgtcacagaagtaaaggagaacatgacatttggatcaactttagtcaccaacccaaatggaggatttctggcttgtgggcccttatatgcctatagatgtggacatttgcattacacaactggaatctgttctgacgtcagccccacatttcaagtcgtgaattccattgcccctgtacaagaatgcagcactcaactggacatagtcatagtgctggatggttccaacagtatttacccatgggacagtgttacagcttttttaaatgaccttcttgaaagaatggatattggtcctaaacagacacaggttggaattgtacagtatggagaaaacgtgacccatgagttcaacctcaataagtattcttccaccgaagaggtacttgttgcagcaaagaaaatagtccagagaggtggccgccagactatgacagctcttggaatagacacagcaagaaaggaggcattcacggaagcccggggtgcccgaagaggagttaaaaaagtcatggttattgtgacagatggagagtctcatgacaatcatcgactgaagaaggtcatccaagactgtgaagatgaaaacattcaacggttttccatagctattcttggcagctataaccgaggaaatttaagcactgaaaaatttgtggaggaaataaaatcaattgcaagtgaacccactgaaaagcatttcttcaatgtctctgatgaattggctctagtcaccattgttaaaactctgggagaaagaatatttgccctggaagccacagctgaccagtcagcagcttcatttgaaatggaaatgtctcagactggcttcagtgctcattattcacaggactgggtcatgcttggagcagtaggagcctatgattggaatggaacagttgtcatgcagaaggctagtcaaatcataatccctcgaaacacaacctttaatgttgagtctaccaaaaagaatgaaccgcttgcttcttatttaggttacactgtaaactctgctactgcttcttctggagatgtgctctatattgctggacagcctcggtacaatcatacaggccaggtcattatctacaggatggaagatggaaacatcaaaattctccagacgctcagtggagaacagattggttcctactttggcagtattttaacaacaactgacattgacaaggattctaatactgacattcttctagtcggagcccctatgtacatgggaacagagaaggaggagcaaggaaaagtgtatgtgtatgctctcaatcagacaaggtttgaatatcaaatgagcctggaacctattaagcagacgtgctgttcatctcggcagcacaattcatgcacaacagaaaacaaaaatgagccatgcggggctcgttttggaactgcaattgctgctgtaaaagacctcaatcttgatggatttaatgacatcgtgataggagctccgctggaagatgatcacgggggagctgtgtacatttatcatggaagtggcaagactataaggaaagagtatgcacaacgtattccatcaggtggggatggtaagacactgaaattttttggccagtctatccacggagaaatggatttaaatggtgacggtctgacagatgtgactattgggggccttggtggtgctgccctcttctggtcccgagatgtggccgtagttaaagtgaccatgaattttgagccaaataaagtgaatattcaaaagaaaaactgccatatggagggaaaggaaacagtatgcataaatgctacagtgtgttttgatgtgaaattaaagtctaaagaagacacgatttatgaagctgatttgcagtaccgtgtcaccctagattcactaagacaaatatcacgaagttttttctctggaactcaagagagaaaggttcaaaggaacatcacagttcgaaaatcagaatgcactaagcactccttctacatgttggacaagcatgactttcaggactctgtgagaataacgttggactttaatcttaccgatccagaaaatgggcctgttcttgatgattctctaccaaactcagtacatgaatatattccctttgccaaagattgtggaaataaggaaaaatgtatctcagacctcagcctgcatgtcgccaccactgaaaaggacctgctgattgtccgatcccagaatgataagttcaacgttagcctcacagtcaaaaatacaaaggacagtgcctataacaccaggacaatagtgcattattctccaaatctagttttttcaggaattgaggctatccaaaaagacagttgtgaatctaatcataatatcacatgtaaagttggatatcccttcctgagaagaggagagatggtaactttcaaaatattgtttcagtttaacacatcctatctcatggaaaatgtgaccatttatttaagtgcaacaagtgacagcgaagaacctcctgaaaccctttctgataatgtagtaaacatttctatcccggtaaaatatgaagttggactacagttttacagctctgcaagtgaataccacatttcaattgctgccaatgagacagtccctgaagttattaattctactgaggacattggaaatgaaattaatatcttctacttgattagaaaaagtggatcttttccaatgccagagcttaagctgtcaatttcattccccaatatgacatcaaatggttaccctgtgctgtacccaactggattgtcatcttctgagaatgcaaactgcagaccccatatctttgaggatcctttcagtatcaactctggaaagaaaatgactacatcaactgaccatctcaaacgaggcacaattctggactgcaatacatgtaaatttgctaccatcacatgtaatctcacttcttctgacatcagccaagtcaatgtttcgcttatcttgtggaaaccaacttttataaaatcatatttttccagcttaaatcttactataaggggagaacttcggagtgaaaatgcatctctggttttaagtagcagcaatcaaaaaagagagcttgctattcaaatatccaaagatgggctaccgggcagagtgccattatgggtcatcctgctgagtgcttttgccggattgttgctgttaatgctgctcattttagcactgtggaagattggattcttcaaaagaccactgaaaaagaaaatggagaaatgaaatattttatgaaagaaaataataacaattattcaataatctatcctcaggtttgcctcaaatatgtgacaagaaatgtataattcatgacatagtcatgtaactatgtaatccatcagggattcattacttggaaaatgacaggtcatgcattatccaaaaacaataccaaaaagacatattttataaaatgacaaaaaatattttacataattactcatttttgttgagtaagcaaaattacaaagtgtttttaaaaaaacctgtacaaatatgtttatgtattaaatcaccatccaaaatatttaaggaatatataaaaagatttttatgatcatagaaacatctattttcaaaacaatataaattaagcttttccccttgattcctgttggatatccatgttcagcatgacagtcagcactcgtaaatgccaagaaaagaattacctgaaaaagatcatttctccctattcaaatgagaatattttcccttggtagaatccatatacaatatggattgaaaattaagtcaccaagaatacatttagcatctttgtgttgggttctatacctaaaaattttccctccctgcccaaggtgattggaaagtactgcaattgagctaaaattttatctaggatggaaaatcaggatagactcgtttaaaaacaagtatattaaatgggttaaattaagcttttacagaacatgcttaattttgatattgagctctaaatgcaaaactcttttatactgaaaaaacacttaaagtagttttgtgtggcatcacagtgatttgtcatgaaaagccatatatgggggacatgctaaaatggcttctgaatgaaatacgacagcagagaaagatgccactgaaatgctgaaattatctttgctgagcagcttttgaatgctaagggttccagtatgtgacccaaagaaagagttgtctcaactccttggtacagggttcattcaaacccccaagctgtgagagtgtgtttatttttaattttttaaaaggtatttaatttccaaccacacttcttatttttttgaaaagacaattttccatttcagtattacattttaccaagaagtcactgctttttaggtgtgttgcatcaatatttaaataaaatcccagaaatgtattttaaagaatttcaggtttgaaaactcaaaccaacaggaagatatcaaaaaaaaaaaaaaaa

SEQ ID NO: 166 - DNA, 4902 bp, Homo sapiens; identical to SEQ ID NO: 35
  gene (1)..(4902): Accession No. NM_005501

SEQ ID NO: 167 - DNA, 3878 bp, Homo sapiens
  gene (1)..(3878): Accession No. NM_002208
ccgcctcctggcctcctggctgaggggaagctgagtgggccacggcccatgtgtcgcactcgcctcggctcccacacagccgcctctgctccagcaaggatgtggctcttccacactctgctctgcatagccagcctggccctgctggccgctttcaatgtggatgtggcccggccctggctcacgcccaagggaggtgcccctttcgtgctcagctcccttctgcaccaagaccccagcaccaaccagacctggctcctggtcaccagccccagaaccaagaggacaccagggcccctccatcgatgttcccttgtccaggatgaaatcctttgccatcctgtagagcatgtccccatccccaaggggaggcaccggggagtgaccgttgtccggagccaccacggtgttttgatatgcattcaagtgctggtccggcggcctcacagcctcagctcagaactcacaggcacctgtagcctcctgggccctgacctccgtccccaggctcaggccaacttcttcgaccttgaaaatctcctggatccagatgcacgtgtggacactggagactgctacagcaacaaagaaggcggtggagaagacgatgtgaacacagccaggcagcgccgggctctggagaaggaggaggaggaagacaaggaggaggaggaagacgaggaggaggaggaagctggcaccgagattgccatcatcctggatggctcaggaagcattgatcccccagactttcagagagccaaagacttcatctccaacatgatgaggaacttctatgaaaagtgttttgagtgcaactttgccttggtgcagtatggaggagtgatccagactgagtttgaccttcgggacagccaggatgtgatggcctccctcgccagagtccagaacatcactcaagtggggagtgtcaccaagactgcctcagccatgcaacacgtcttagacagcatcttcacctcaagccacggctccaggagaaaggcatccaaggtcatggtggtgctcaccgatggtggcatattcgaggaccccctcaaccttacgacagtcatcaactcccccaaaatgcagggtgttgagcgctttgccattggggtgggagaagaatttaagagtgctaggactgcgagggaactgaacctgatcgcctcagacccggatgagacccatgctttcaaggtgaccaactacatggcgctggatgggctgctgagcaaactgcggtacaacatcatcagcatggaaggcacggttggagacgcccttcactaccagctggcacagattggcttcagtgctcagatcctggatgagcggcaggtgctgctcggcgccgtcggggcctttgactggtccggaggggcgttgctctacgacacacgcagccgccggggccgcttcctgaaccagacagcggcggcggcggcagacgcggaggctgcgcagtacagctacctgggttacgctgtggccgtgctgcacaagacctgcagcctctcctacatcgcgggggctccacggtacaaacatcatggggccgtgtttgagctccagaaggagggcagagaggccagcttcctgccagtgctggagggagagcagatggggtcctattttggctctgagctgtgccctgtggacattgacatggatggaagcacggacttcttgctggtggctgctccattttaccacgttcatggagaagaaggcagagtctacgtgtaccgtctcagcgagcaggatggttctttctccttggcacgcatactgagtgggcaccccgggttcaccaatgcccgctttggctttgccatggcggctatgggggatctcagtcaggataagctcacagatgtggccatcggggcccccctggaaggttttggggcagatgatggtgccagcttcggcagtgtgtatatctacaatggacactgggacggcctctccgccagcccctcgcagcggatcagagcctccacggtggccccaggactccagtacttcggcatgtccatggctggtggctttgatattagtggcgacggccttgccgacatcaccgtgggcactctgggccaggcggttgtgttccgctcccggcctgtggttcgcctgaaggtctccatggccttcacccccagcgcactgcccatcggcttcaacggcgtcgtgaatgtccgtttatgttttgaaatcagctctgtaaccacagcctctgagtcaggcctccgcgaggcacttctcaacttcacgctggatgtggatgtggggaagcagaggagacggctgcagtgttcagacgtaagaagctgtctgggctgcctgagggagtggagcagcggatcccagctttgtgaggacctcctgctcatgcccacagagggagagctctgtgaggaggactgcttctccaatgccagtgtcaaagtcagctaccagctccagacccctgagggacagacggaccatccccagcccatcctggaccgctacactgagccctttgccatcttccagctgccctatgagaaggcctgcaagaataagctgttttgtgtcgcagaattacagttggccaccaccgtctctcagcaggagttggtggtgggtctcacaaaggagctgaccctgaacattaacctaactaactccggggaagattcctacatgacaagcatggccttgaattaccccagaaacctgcagttgaagaggatgcaaaagcctccctctccaaacattcagtgtgatgaccctcagccggttgcttctgtcctgatcatgaactgcaggattggtcaccccgtcctcaagaggtcatctgctcatgtttcagtcgtttggcagctagaggagaatgcctttccaaacaggacagcagacatcactgtgactgtcaccaattccaatgaaagacggtctttggccaacgagacccacacccttcaattcaggcatggcttcgttgcagttctgtccaaaccatccataatgtacgtgaacacaggccaggggctttctcaccacaaagaattcctcttccatgtacatggggagaacctctttggagcagaataccagttgcaaatttgcgtcccaaccaaattacgaggtctccaggttgtagcagtgaagaagctgacgaggactcaggcctccacggtgtgcacctggagtcaggagcgcgcttgtgcgtacagttcggttcagcatgtggaagaatggcattcagtgagctgtgtcatcgcttcagataaagaaaatgtcaccgtggctgcagagatctcctgggatcactctgaggagttactaaaagatgtaactgaactgcagatccttggtgaaatatctttcaacaaatctctatatgagggactgaatgcagagaaccacagaactaagatcactgtcgtcttcctgaaagatgagaagtaccattctttgcctatcatcattaaaggcagcgttggtggacttctggtgttgatcgtgattctggtcatcctgttcaagtgtggcttttttaaaagaaaatatcaacaactgaacttggagagcatcaggaaggcccagctgaaatcagagaatctgctcgaagaagagaattaggacctgctatccactgggagaggctatcagccagtcctgggacttggagacccagcatcctttgcattactttttccttcaggatgatctagagcagcatggagctgttggtagaatattagtttttaaccatacattgtcccaaaagtgtctgtgcattgtgcaaaaagtaaacttaggaaacatttggtattaaataaatttacacttttctttgcagtaaaaaaaaaaaaaaaaaa

SEQ ID NO: 168 - DNA, 3879 bp, Homo sapiens
  gene (1)..(3879): Accession No. NM_002211
atcagacgcgcagaggaggcggggccgcggctggtttcctgccggggggcggctctgggccgccgagtcccctcctcccgcccctgaggaggaggagccgccgccacccgccgcgcccgacacccgggaggccccgccagcccgcgggagaggcccagcgggagtcgcggaacagcaggcccgagcccaccgcgccgggccccggacgccgcgcggaaaagatgaatttacaaccaattttctggattggactgatcagttcagtttgctgtgtgtttgctcaaacagatgaaaatagatgtttaaaagcaaatgccaaatcatgtggagaatgtatacaagcagggccaaattgtgggtggtgcacaaattcaacatttttacaggaaggaatgcctacttctgcacgatgtgatgatttagaagccttaaaaaagaagggttgccctccagatgacatagaaaatcccagaggctccaaagatataaagaaaaataaaaatgtaaccaaccgtagcaaaggaacagcagagaagctcaagccagaggatattactcagatccaaccacagcagttggttttgcgattaagatcaggggagccacagacatttacattaaaattcaagagagctgaagactatcccattgacctctactaccttatggacctgtcttactcaatgaaagacgatttggagaatgtaaaaagtcttggaacagatctgatgaatgaaatgaggaggattacttcggacttcagaattggatttggctcatttgtggaaaagactgtgatgccttacattagcacaacaccagctaagctcaggaacccttgcacaagtgaacagaactgcaccagcccatttagctacaaaaatgtgctcagtcttactaataaaggagaagtatttaatgaacttgttggaaaacagcgcatatctggaaatttggattctccagaaggtggtttcgatgccatcatgcaagttgcagtttgtggatcactgattggctggaggaatgttacacggctgctggtgttttccacagatgccgggtttcactttgctggagatgggaaacttggtggcattgttttaccaaatgatggacaatgtcacctggaaaataatatgtacacaatgagccattattatgattatccttctattgctcaccttgtccagaaactgagtgaaaataatattcagacaatttttgcagttactgaagaatttcagcctgtttacaaggagctgaaaaacttgatccctaagtcagcagtaggaacattatctgcaaattctagcaatgtaattcagttgatcattgatgcatacaattccctttcctcagaagtcattttggaaaacggcaaattgtcagaaggcgtaacaataagttacaaatcttactgcaagaacggggtgaatggaacaggggaaaatggaagaaaatgttccaatatttccattggagatgaggttcaatttgaaattagcataacttcaaataagtgtccaaaaaaggattctgacagctttaaaattaggcctctgggctttacggaggaagtagaggttattcttcagtacatctgtgaatgtgaatgccaaagcgaaggcatccctgaaagtcccaagtgtcatgaaggaaatgggacatttgagtgtggcgcgtgcaggtgcaatgaagggcgtgttggtagacattgtgaatgcagcacagatgaagttaacagtgaagacatggatgcttactgcaggaaagaaaacagttcagaaatctgcagtaacaatggagagtgcgtctgcggacagtgtgtttgtaggaagagggataatacaaatgaaatttattctggcaaattctgcgagtgtgataatttcaactgtgatagatccaatggcttaatttgtggaggaaatggtgtttgcaagtgtcgtgtgtgtgagtgcaaccccaactacactggcagtgcatgtgactgttctttggatactagtacttgtgaagccagcaacggacagatctgcaatggccggggcatctgcgagtgtggtgtctgtaagtgtacagatccgaagtttcaagggcaaacgtgtgagatgtgtcagacctgccttggtgtctgtgctgagcataaagaatgtgttcagtgcagagccttcaataaaggagaaaagaaagacacatgcacacaggaatgttcctattttaacattaccaaggtagaaagtcgggacaaattaccccagccggtccaacctgatcctgtgtcccattgtaaggagaaggatgttgacgactgttggttctattttacgtattcagtgaatgggaacaacgaggtcatggttcatgttgtggagaatccagagtgtcccactggtccagacatcattccaattgtagctggtgtggttgctggaattgttcttattggccttgcattactgctgatatggaagcttttaatgataattcatgacagaagggagtttgctaaatttgaaaaggagaaaatgaatgccaaatgggacacgggtgaaaatcctatttataagagtgccgtaacaactgtggtcaatccgaagtatgagggaaaatgagtactgcccgtgcaaatcccacaacactgaatgcaaagtagcaatttccatagtcacagttaggtagctttagggcaatattgccatggttttactcatgtgcaggttttgaaaatgtacaatatgtataatttttaaaatgttttattattttgaaaataatgttgtaattcatgccagggactgacaaaagacttgagacaggatggttactcttgtcagctaaggtcacattgtgcctttttgaccttttcttcctggactattgaaatcaagcttattggattaagtgatatttctatagcgattgaaagggcaatagttaaagtaatgagcatgatgagagtttctgttaatcatgtattaaaactgatttttagctttacaaatatgtcagtttgcagttatgcagaatccaaagtaaatgtcctgctagctagttaaggattgttttaaatctgttattttgctatttgcctgttagacatgactgatgacatatctgaaagacaagtatgttgagagttgctggtgtaaaatacgtttgaaatagttgatctacaaaggccatgggaaaaattcagagagttaggaaggaaaaaccaatagctttaaaacctgtgtgccattttaagagttacttaatgtttggtaacttttatgccttcactttacaaattcaagccttagataaaagaaccgagcaattttctgctaaaaagtccttgatttagcactatttacatacaggccatactttacaaagtatttgctgaatggggaccttttgagttgaatttattttattatttttattttgtttaatgtctggtgctttctgtcacctcttctaatcttttaatgtatttgtttgcaattttggggtaagactttttttatgagtactttttctttgaagttttagcggtcaatttgcctttttaatgaacatgtgaagttatactgtggctatgcaacagctctcacctacgcgagtcttactttgagttagtgccataacagaccactgtatgtttacttctcaccatttgagttgcccatcttgtttcacactagtcacattcttgttttaagtgcctttagttttaacagttcactttttacagtgctatttactgaagttatttattaaatatgcctaaaatacttaaatcggatgtcttgactctgatgtattttatcaggttgtgtgcatgaaatttttatagattaaagaagttgaggaaaagcaaaaaaaaaa

SEQ ID NO: 169 - DNA, 3338 bp, Homo sapiens
  gene (1)..(3338): Accession No. NM_002228
gacatcatgggctatttttaggggttgactggtagcagataagtgttgagctcgggctggataagggctcagagttgcactgagtgtggctgaagcagcgaggcgggagtggaggtgcgcggagtcaggcagacagacagacacagccagccagccaggtcggcagtatagtccgaactgcaaatcttattttcttttcaccttctctctaactgcccagagctagcgcctgtggctcccgggctggtgtttcgggagtgtccagagagcctggtctccagccgcccccgggaggagagccctgctgcccaggcgctgttgacagcggcggaaagcagcggtacccacgcgcccgccgggggaagtcggcgagcggctgcagcagcaaagaactttcccggctgggaggaccggagacaagtggcagagtcccggagcgaacttttgcaagcctttcctgcgtcttaggcttctccacggcggtaaagaccagaaggcggcggagagccacgcaagagaagaaggacgtgcgctcagcttcgctcgcaccggttgttgaacttgggcgagcgcgagccgcggctgccgggcgccccctccccctagcagcggaggaggggacaagtcgtcggagtccgggcggccaagacccgccgccggccggccactgcagggtccgcactgatccgctccgcggggagagccgctgctctgggaagtgagttcgcctgcggactccgaggaaccgctgcgcccgaagagcgctcagtgagtgaccgcgacttttcaaagccgggtagcgcgcgcgagtcgacaagtaagagtgcgggaggcatcttaattaaccctgcgctccctggagcgagctggtgaggagggcgcagcggggacgacagccagcgggtgcgtgcgctcttagagaaactttccctgtcaaaggctccggggggcgcgggtgtcccccgcttgccagagccctgttgcggccccgaaacttgtgcgcgcagcccaaactaacctcacgtgaagtgacggactgttctatgactgcaaagatggaaacgaccttctatgacgatgccctcaacgcctcgttcctcccgtccgagagcggaccttatggctacagtaaccccaagatcctgaaacagagcatgaccctgaacctggccgacccagtggggagcctgaagccgcacctccgcgccaagaactcggacctcctcacctcgcccgacgtggggctgctcaagctggcgtcgcccgagctggagcgcctgataatccagtccagcaacgggcacatcaccaccacgccgacccccacccagttcctgtgccccaagaacgtgacagatgagcaggagggcttcgccgagggcttcgtgcgcgccctggccgaactgcacagccagaacacgctgcccagcgtcacgtcggcggcgcagccggtcaacggggcaggcatggtggctcccgcggtagcctcggtggcagggggcagcggcagcggcggcttcagcgccagcctgcacagcgagccgccggtctacgcaaacctcagcaacttcaacccaggcgcgctgagcagcggcggcggggcgccctcctacggcgcggccggcctggcctttcccgcgcaaccccagcagcagcagcagccgccgcaccacctgccccagcagatgcccgtgcagcacccgcggctgcaggccctgaaggaggagcctcagacagtgcccgagatgcccggcgagacaccgcccctgtcccccatcgacatggagtcccaggagcggatcaaggcggagaggaagcgcatgaggaaccgcatcgctgcctccaagtgccgaaaaaggaagctggagagaatcgcccggctggaggaaaaagtgaaaaccttgaaagctcagaactcggagctggcgtccacggccaacatgctcagggaacaggtggcacagcttaaacagaaagtcatgaaccacgttaacagtgggtgccaactcatgctaacgcagcagttgcaaacattttgaagagagaccgtcgggggctgaggggcaacgaagaaaaaaaataacacagagagacagacttgagaacttgacaagttgcgacggagagaaaaaagaagtgtccgagaactaaagccaagggtatccaagttggactgggttgcgtcctgacggcgcccccagtgtgcacgagtgggaaggacttggcgcgccctcccttggcgtggagccagggagcggccgcctgcgggctgccccgctttgcggacgggctgtccccgcgcgaacggaacgttggacttttcgttaacattgaccaagaactgcatggacctaacattcgatctcattcagtattaaaggggggagggggagggggttacaaactgcaatagagactgtagattgcttctgtagtactccttaagaacacaaagcggggggagggttggggaggggcggcaggagggaggtttgtgagagcgaggctgagcctacagatgaactctttctggcctgccttcgttaactgtgtatgtacatatatatattttttaatttgatgaaagctgattactgtcaataaacagcttcatgcctttgtaagttatttcttgtttgtttgtttgggtatcctgcccagtgttgtttgtaaataagagatttggagcactctgagtttaccatttgtaataaagtatataatttttttatgttttgtttctgaaaattccagaaaggatatttaagaaaatacaataaactattggaaagtactcccctaacctcttttctgcatcatctgtagatactagctatctaggtggagttgaaagagttaagaatgtcgattaaaatcactctcagtgcttcttactattaagcagtaaaaactgttctctattagactttagaaataaatgtacctgatgtacctgatgctatggtcaggttatactcctcctcccccagctatctatatggaattgcttaccaaaggatagtgcgatgtttcaggaggctggaggaaggggggttgcagtggagagggacagcccactgagaagtcaaacatttcaaagtttggattgtatcaagtggcatgtgctgtgaccatttataatgttagtagaaattttacaataggtgcttattctcaaagcaggaattggtggcagattttacaaaagatgtatccttccaatttggaatcttctctttgacaattcctagataaaaagatggcctttgcttatgaatatttataacagcattcttgtcacaataaatgtattcaaataccaaaaaaaaaaaaaaaaa

SEQ ID NO: 170 - DNA, 6055 bp, Homo sapiens
  gene (1)..(6055): Accession No. NM_002253
actgagtcccgggaccccgggagagcggtcaatgtgtggtcgctgcgtttcctctgcctgcgccgggcatcacttgcgcgccgcagaaagtccgtctggcagcctggatatcctctcctaccggcacccgcagacgcccctgcagccgcggtcggcgcccgggctccctagccctgtgcgctcaactgtcctgcgctgcggggtgccgcgagttccacctccgcgcctccttctctagacaggcgctgggagaaagaaccggctcccgagttctgggcatttcgcccggctcgaggtgcaggatgcagagcaaggtgctgctggccgtcgccctgtggctctgcgtggagacccgggccgcctctgtgggtttgcctagtgtttctcttgatctgcccaggctcagcatacaaaaagacatacttacaattaaggctaatacaactcttcaaattacttgcaggggacagagggacttggactggctttggcccaataatcagagtggcagtgagcaaagggtggaggtgactgagtgcagcgatggcctcttctgtaagacactcacaattccaaaagtgatcggaaatgacactggagcctacaagtgcttctaccgggaaactgacttggcctcggtcatttatgtctatgttcaagattacagatctccatttattgcttctgttagtgaccaacatggagtcgtgtacattactgagaacaaaaacaaaactgtggtgattccatgtctcgggtccatttcaaatctcaacgtgtcactttgtgcaagatacccagaaaagagatttgttcctgatggtaacagaatttcctgggacagcaagaagggctttactattcccagctacatgatcagctatgctggcatggtcttctgtgaagcaaaaattaatgatgaaagttaccagtctattatgtacatagttgtcgttgtagggtataggatttatgatgtggttctgagtccgtctcatggaattgaactatctgttggagaaaagcttgtcttaaattgtacagcaagaactgaactaaatgtggggattgacttcaactgggaatacccttcttcgaagcatcagcataagaaacttgtaaaccgagacctaaaaacccagtctgggagtgagatgaagaaatttttgagcaccttaactatagatggtgtaacccggagtgaccaaggattgtacacctgtgcagcatccagtgggctgatgaccaagaagaacagcacatttgtcagggtccatgaaaaaccttttgttgcttttggaagtggcatggaatctctggtggaagccacggtgggggagcgtgtcagaatccctgcgaagtaccttggttacccacccccagaaataaaatggtataaaaatggaataccccttgagtccaatcacacaattaaagcggggcatgtactgacgattatggaagtgagtgaaagagacacaggaaattacactgtcatccttaccaatcccatttcaaaggagaagcagagccatgtggtctctctggttgtgtatgtcccaccccagattggtgagaaatctctaatctctcctgtggattcctaccagtacggcaccactcaaacgctgacatgtacggtctatgccattcctcccccgcatcacatccactggtattggcagttggaggaagagtgcgccaacgagcccagccaagctgtctcagtgacaaacccatacccttgtgaagaatggagaagtgtggaggacttccagggaggaaataaaattgaagttaataaaaatcaatttgctctaattgaaggaaaaaacaaaactgtaagtacccttgttatccaagcggcaaatgtgtcagctttgtacaaatgtgaagcggtcaacaaagtcgggagaggagagagggtgatctccttccacgtgaccaggggtcctgaaattactttgcaacctgacatgcagcccactgagcaggagagcgtgtctttgtggtgcactgcagacagatctacgtttgagaacctcacatggtacaagcttggcccacagcctctgccaatccatgtgggagagttgcccacacctgtttgcaagaacttggatactctttggaaattgaatgccaccatgttctctaatagcacaaatgacattttgatcatggagcttaagaatgcatccttgcaggaccaaggagactatgtctgccttgctcaagacaggaagaccaagaaaagacattgcgtggtcaggcagctcacagtcctagagcgtgtggcacccacgatcacaggaaacctggagaatcagacgacaagtattggggaaagcatcgaagtctcatgcacggcatctgggaatccccctccacagatcatgtggtttaaagataatgagacccttgtagaagactcaggcattgtattgaaggatgggaaccggaacctcactatccgcagagtgaggaaggaggacgaaggcctctacacctgccaggcatgcagtgttcttggctgtgcaaaagtggaggcatttttcataatagaaggtgcccaggaaaagacgaacttggaaatcattattctagtaggcacggcggtgattgccatgttcttctggctacttcttgtcatcatcctacggaccgttaagcgggccaatggaggggaactgaagacaggctacttgtccatcgtcatggatccagatgaactcccattggatgaacattgtgaacgactgccttatgatgccagcaaatgggaattccccagagaccggctgaagctaggtaagcctcttggccgtggtgcctttggccaagtgattgaagcagatgcctttggaattgacaagacagcaacttgcaggacagtagcagtcaaaatgttgaaagaaggagcaacacacagtgagcatcgagctctcatgtctgaactcaagatcctcattcatattggtcaccatctcaatgtggtcaaccttctaggtgcctgtaccaagccaggagggccactcatggtgattgtggaattctgcaaatttggaaacctgtccacttacctgaggagcaagagaaatgaatttgtcccctacaagaccaaaggggcacgattccgtcaagggaaagactacgttggagcaatccctgtggatctgaaacggcgcttggacagcatcaccagtagccagagctcagccagctctggatttgtggaggagaagtccctcagtgatgtagaagaagaggaagctcctgaagatctgtataaggacttcctgaccttggagcatctcatctgttacagcttccaagtggctaagggcatggagttcttggcatcgcgaaagtgtatccacagggacctggcggcacgaaatatcctcttatcggagaagaacgtggttaaaatctgtgactttggcttggcccgggatatttataaagatccagattatgtcagaaaaggagatgctcgcctccctttgaaatggatggccccagaaacaatttttgacagagtgtacacaatccagagtgacgtctggtcttttggtgttttgctgtgggaaatattttccttaggtgcttctccatatcctggggtaaagattgatgaagaattttgtaggcgattgaaagaaggaactagaatgagggcccctgattatactacaccagaaatgtaccagaccatgctggactgctggcacggggagcccagtcagagacccacgttttcagagttggtggaacatttgggaaatctcttgcaagctaatgctcagcaggatggcaaagactacattgttcttccgatatcagagactttgagcatggaagaggattctggactctctctgcctacctcacctgtttcctgtatggaggaggaggaagtatgtgaccccaaattccattatgacaacacagcaggaatcagtcagtatctgcagaacagtaagcgaaagagccggcctgtgagtgtaaaaacatttgaagatatcccgttagaagaaccagaagtaaaagtaatcccagatgacaaccagacggacagtggtatggttcttgcctcagaagagctgaaaactttggaagacagaaccaaattatctccatcttttggtggaatggtgcccagcaaaagcagggagtctgtggcatctgaaggctcaaaccagacaagcggctaccagtccggatatcactccgatgacacagacaccaccgtgtactccagtgaggaagcagaacttttaaagctgatagagattggagtgcaaaccggtagcacagcccagattctccagcctgactcggggaccacactgagctctcctcctgtttaaaaggaagcatccacacccccaactcctggacatcacatgagaggtgctgctcagattttcaagtgttgttctttccaccagcaggaagtagccgcatttgattttcatttcgacaacagaaaaaggacctcggactgcagggagccagtcttctaggcatatcctggaagaggcttgtgacccaagaatgtgtctgtgtcttctcccagtgttgacctgatcctctttttcattcatttaaaaagcatttatcatgccccctgctgcgggtctcaccatgggtttagaacaaagacgttcaagaaatggccccatcctcaaagaagtagcagtacctggggagctgacacttctgtaaaactagaagataaaccaggcaatgtaagtgttcgaggtgttgaagatgggaaggatttgcagggctgagtctatccaagaggctttgtttaggacgtgggtcccaagccaagccttaagtgtggaattcggattgatagaaaggaagactaacgttaccttgctttggagagtactggagcctgcaaatgcattgtgtttgctctggtggaggtgggcatggggtctgttctgaaatgtaaagggttcagacggggtttctggttttagaaggttgcgtgttcttcgagttgggctaaagtagagttcgttgtgctgtttctgactcctaatgagagttccttccagaccgttacgtgtctcctggccaagccccaggaaggaaatgatgcagctctggctccttgtctcccaggctgatcctttattcagaataccacaaagaaaggacattcagctcaaggctccctgccgtgttgaagagttctgactgcacaaaccagcttctggtttcttctggaatgaataccctcatatctgtcctgatgtgatatgtctgagactgaatgcgggaggttcaatgtgaagctgtgtgtggtgtcaaagtttcaggaaggattttacccttttgttcttccccctgtccccaacccactctcaccccgcaacccatcagtattttagttatttggcctctactccagtaaacctgattgggtttgttcactctctgaatgattattagccagacttcaaaattattttatagcccaaattataacatctattgtattatttagacttttaacatatagagctatttctactgatttttgcccttgttctgtcctttttttcaaaaaagaaaatgtgttttttgtttggtaccatagtgtgaaatgctgggaacaatgactataagacatgctatggcacatatatttatagtctgtttatgtagaaacaaatgtaatatattaaagccttatatataatgaactttgtactattcacattttgtatcagtattatgtagcataacaaaggtcataatgctttcagcaattgatgtcattttattaaagaacattgaaaaacttgaaggaatccctttgcaaggttgcattactgtacccatcatttctaaaatggaagagggggtggctgggcacagtggccgacacctaaaaacccagcactttggggggccaaggtgggaggatcgcttgagcccaggagttcaagaccagtctggccaacatggtcagattccatctcaaagaaaaaaggtaaaaataaaataaaatggagaagaaggaatcaga

SEQ ID NO: 171 - DNA, 3332 bp, Homo sapiens
  gene (1)..(3332): Accession No. NM_006500
acttggctctcgccctccggccgggaagcatggggcttcccaggctggtctgcgccttcttgctcgccgcctgctgctgctgtcctcgcgtcgcgggtgtgcccggagaggctgagcagcctgcgcctgagctggtggaggtggaagtgggcagcacagcccttctgaagtgcggcctctcccagtcccaaggcaacctcagccatgtcgactggttttctgtccacaaggagaagcggacgctcatcttccgtgtgcgccagggccagggccagagcgaacctggggagtacgagcagcggctcagcctccaggacagaggggctactctggccctgactcaagtcaccccccaagacgagcgcatcttcttgtgccagggcaagcgccctcggtcccaggagtaccgcatccagctccgcgtctacaaagctccggaggagccaaacatccaggtcaaccccctgggcatccctgtgaacagtaaggagcctgaggaggtcgctacctgtgtagggaggaacgggtaccccattcctcaagtcatctggtacaagaatggccggcctctgaaggaggagaagaaccgggtccacattcagtcgtcccagactgtggagtcgagtggtttgtacaccttgcagagtattctgaaggcacagctggttaaagaagacaaagatgcccagttttactgtgagctcaactaccggctgcccagtgggaaccacatgaaggagtccagggaagtcaccgtccctgttttctacccgacagaaaaagtgtggctggaagtggagcccgtgggaatgctgaaggaaggggaccgcgtggaaatcaggtgtttggctgatggcaaccctccaccacacttcagcatcagcaagcagaaccccagcaccagggaggcagaggaagagacaaccaacgacaacggggtcctggtgctggagcctgcccggaaggaacacagtgggcgctatgaatgtcagggcctggacttggacaccatgatatcgctgctgagtgaaccacaggaactactggtgaactatgtgtctgacgtccgagtgagtcccgcagcccctgagagacaggaaggcagcagcctcaccctgacctgtgaggcagagagtagccaggacctcgagttccagtggctgagagaagagacaggccaggtgctggaaagggggcctgtgcttcagttgcatgacctgaaacgggaggcaggaggcggctatcgctgcgtggcgtctgtgcccagcatacccggcctgaaccgcacacagctggtcaacgtggccatttttggccccccttggatggcattcaaggagaggaaggtgtgggtgaaagagaatatggtgttgaatctgtcttgtgaagcgtcagggcacccccggcccaccatctcctggaacgtcaacggcacggcaagtgaacaagaccaagatccacagcgagtcctgagcaccctgaatgtcctcgtgaccccggagctgttggagacaggtgttgaatgcacggcctccaacgacctgggcaaaaacaccagcatcctcttcctggagctggtcaatttaaccaccctcacaccagactccaacacaaccactggcctcagcacttccactgccagtcctcataccagagccaacagcacctccacagagagaaagctgccggagccggagagccggggcgtggtcatcgtggctgtgattgtgtgcatcctggtcctggcggtgctgggcgctgtcctctatttcctctataagaagggcaagctgccgtgcaggcgctcagggaagcaggagatcacgctacccccgtctcgtaagagcgaacttgtagttgaagttaagtcagataagctcccagaagagatgggcctcctgcagggcagcagcggtgacaagagggctccgggagaccagggagagaaatacatcgatctgaggcattagccccgaatcacttcagctcccttccctgcctggaccattcccagctccctgctcactcttctctcagccaaagcctccaaagggactagagagaagcctcctgctcccctcgcctgcacaccccctttcagagggccactgggttaggacctgaggacctcacttggccctgcaaggcccgcttttcagggaccagtccaccaccatctcctccacgttgagtgaagctcatcccaagcaaggagccccagtctcccgagcgggtaggagagtttcttgcagaacgtgttttttctttacacacattatggctgtaaatacctggctcctgccagcagctgagctgggtagcctctctgagctggtttcctgccccaaaggctggcttccaccatccaggtgcaccactgaagtgaggacacaccggagccaggcgcctgctcatgttgaagtgcgctgttcacacccgctccggagagcaccccagcagcatccagaagcagctgcagtgttgctgccaccaccctcctgtctgcctcttcaaagtctcctgtgacattttttctttggtcagaagccaggaactggtgtcattccttaaaagatacgtgccggggccaggtgtggtggctcacgcctgtaatcccagcactttgggaggccgaggcgggcggatcacaaagtcaggacgagaccatcctggctaacacggtgaaaccctgtctctactaaaaatacaaaaaaaaattagctaggcgtagtggttggcacctatagtcccagctactcggaaggctgaagcaggagaatggtatgaatccaggaggtggagcttgcagtgagccgagaccgtgccactgcactccagcctgggcaacacagcgagactccgtctcgaggaaaaaaaaagaaaagatacgtgcctgcggtgaggaagctgggcgctgttttcgagttcaggtgaattagcctcaatcccccgtgttcacttggctcccatagccctcttgatggatcacgtaaaactgaaaggcagcggggagcagacaaagatgaggtctacactgtccttcatggggattaaagctatggttatattagcaccaaacttctacaaaccaagctcagggccccaaccctagaagggcccaaatgagagaatggtacttagggatggaaaacgggcctggctagagcttcgggtgtgtgtgtctgtctgtgtgtatgcatacatatgtgtgtatatatggttttgtcaggtgtgtaaatttgcaaattgtttcctttatatatgtatgtatatatatatatgaaaatatatatatatatgaaaaataaagcttaattgtcccagaaatcata

SEQ ID NO: 172 - DNA, 3549 bp, Homo sapiens
  gene (1)..(3549): Accession No. NM_004530
acatctggcggctgccctcccttgtttccgctgcatccagacttcctcaggcggtggctggaggctgcgcatctggggctttaaacatacaaagggattgccaggacctgcggcggcggcggcggcggcgggggctggggcgcgggggccggaccatgagccgctgagccgggcaaaccccaggccaccgagccagcggaccctcggagcgcagccctgcgccgcggagcaggctccaaccaggcggcgaggcggccacacgcaccgagccagcgacccccgggcgacgcgcggggccagggagcgctacgatggaggcgctaatggcccggggcgcgctcacgggtcccctgagggcgctctgtctcctgggctgcctgctgagccacgccgccgccgcgccgtcgcccatcatcaagttccccggcgatgtcgcccccaaaacggacaaagagttggcagtgcaatacctgaacaccttctatggctgccccaaggagagctgcaacctgtttgtgctgaaggacacactaaagaagatgcagaagttctttggactgccccagacaggtgatcttgaccagaataccatcgagaccatgcggaagccacgctgcggcaacccagatgtggccaactacaacttcttccctcgcaagcccaagtgggacaagaaccagatcacatacaggatcattggctacacacctgatctggacccagagacagtggatgatgcctttgctcgtgccttccaagtctggagcgatgtgaccccactgcggttttctcgaatccatgatggagaggcagacatcatgatcaactttggccgctgggagcatggcgatggatacccctttgacggtaaggacggactcctggctcatgccttcgccccaggcactggtgttgggggagactcccattttgatgacgatgagctatggaccttgggagaaggccaagtggtccgtgtgaagtatgggaacgccgatggggagtactgcaagttccccttcttgttcaatggcaaggagtacaacagctgcactgataccggccgcagcgatggcttcctctggtgctccaccacctacaactttgagaaggatggcaagtacggcttctgtccccatgaagccctgttcaccatgggcggcaacgctgaaggacagccctgcaagtttccattccgcttccagggcacatcctatgacagctgcaccactgagggccgcacggatggctaccgctggtgcggcaccactgaggactacgaccgcgacaagaagtatggcttctgccctgagaccgccatgtccactgttggtgggaactcagaaggtgccccctgtgtcttccccttcactttcctgggcaacaaatatgagagctgcaccagcgccggccgcagtgacggaaagatgtggtgtgcgaccacagccaactacgatgatgaccgcaagtggggcttctgccctgaccaagggtacagcctgttcctcgtggcagcccacgagtttggccacgccatggggctggagcactcccaagaccctggggccctgatggcacccatttacacctacaccaagaacttccgtctgtcccaggatgacatcaagggcattcaggagctctatggggcctctcctgacattgaccttggcaccggccccacccccacgctgggccctgtcactcctgagatctgcaaacaggacattgtatttgatggcatcgctcagatccgtggtgagatcttcttcttcaaggaccggttcatttggcggactgtgacgccacgtgacaagcccatggggcccctgctggtggccacattctggcctgagctcccggaaaagattgatgcggtatacgaggccccacaggaggagaaggctgtgttctttgcagggaatgaatactggatctactcagccagcaccctggagcgagggtaccccaagccactgaccagcctgggactgccccctgatgtccagcgagtggatgccgcctttaactggagcaaaaacaagaagacatacatctttgctggagacaaattctggagatacaatgaggtgaagaagaaaatggatcctggcttccccaagctcatcgcagatgcctggaatgccatccccgataacctggatgccgtcgtggacctgcagggcggcggtcacagctacttcttcaagggtgcctattacctgaagctggagaaccaaagtctgaagagcgtgaagtttggaagcatcaaatccgactggctaggctgctgagctggccctggctcccacaggcccttcctctccactgccttcgatacaccgggcctggagaactagagaaggacccggaggggcctggcagccgtgccttcagctctacagctaatcagcattctcactcctacctggtaatttaagattccagagagtggctcctcccggtgcccaagaatagatgctgactgtactcctcccaggcgccccttccccctccaatcccaccaaccctcagagccacccctaaagagatactttgatattttcaacgcagccctgctttgggctgccctggtgctgccacacttcaggctcttctcctttcacaaccttctgtggctcacagaacccttggagccaatggagactgtctcaagagggcactggtggcccgacagcctggcacagggcagtgggacagggcatggccaggtggccactccagacccctggcttttcactgctggctgccttagaacctttcttacattagcagtttgctttgtatgcactttgtttttttctttgggtcttgttttttttttccacttagaaattgcatttcctgacagaaggactcaggttgtctgaagtcactgcacagtgcatctcagcccacatagtgatggttcccctgttcactctacttagcatgtccctaccgagtctcttctccactggatggaggaaaaccaagccgtggcttcccgctcagccctccctgcccctcccttcaaccattccccatgggaaatgtcaacaagtatgaataaagacacctactgagtggccgtgtttgccatctgttttagcagagcctagacaagggccacagacccagccagaagcggaaacttaaaaagtccgaatctctgctccctgcagggcacaggtgatggtgtctgctggaaaggtcagagcttccaaagtaaacagcaagagaacctcagggagagtaagctctagtccctctgtcctgtagaaagagccctgaagaatcagcaattttgttgctttattgtggcatctgttcgaggtttgcttcctctttaagtctgtttcttcattagcaatcatatcagttttaatgctactactaacaatgaacagtaacaataatatccccctcaattaatagagtgctttctatgtgcaaggcacttttcacgtgtcacctattttaacctttccaaccacataaataaaaaaggccattattagttgaaaaaaaaaaaaaaaaaaaaaaaaa

SEQ ID NO: 173 - DNA, 3622 bp, Homo sapiens
  gene (1)..(3622): Accession No. NM_001033081
aatgcgcctgcagctcgcgctcccgcgccgatcccgagagcgtccgggccgccgtgcgcgagcgagggagggcgcgcgcgcggggggggcgcgcttgtgagtgcgggccgcgctctcggcggcgcgcatgtgcgtgtgtgctggctgccgggctgccccgagccggcggggagccggtccgctccaggtggcgggcggctggagcgaggtgaggctgcgggtggccagggcacgggcgcgggtcccgcggtgcgggctggctgcaggctgccttctgggcacggcgcgcccccgcccggccccgccgggccctgggagctgcgctccgggcggcgctggcaaagtttgctttgaactcgctgcccacagtcgggtccgcgcgctgcgattggcttcccctaccactctgacccggggcccggcttcccgggacgcgaggactgggcgcaggctgcaagctggtggggttggggaggaacgagagcccggcagccgactgtgccgagggacccggggacacctccttcgcccggccggcacccggtcagcacgtccccccttccctcccgcagggagcggacatggactacgactcgtaccagcactatttctacgactatgactgcggggaggatttctaccgctccacggcgcccagcgaggacatctggaagaaattcgagctggtgccatcgccccccacgtcgccgccctggggcttgggtcccggcgcaggggacccggcccccgggattggtcccccggagccgtggcccggagggtgcaccggagacgaagcggaatcccggggccactcgaaaggctggggcaggaactacgcctccatcatacgccgtgactgcatgtggagcggcttctcggcccgggaacggctggagagagctgtgagcgaccggctcgctcctggcgcgccccgggggaacccgcccaaggcgtccgccgccccggactgcactcccagcctcgaagccggcaacccggcgcccgccgccccctgtccgctgggcgaacccaagacccaggcctgctccgggtccgagagcccaagcgactcggagaatgaagaaattgatgttgtgacagtagagaagaggcagtctctgggtattcggaagccggtcaccatcacggtgcgagcagaccccctggatccctgcatgaagcatttccacatctccatccatcagcaacagcacaactatgctgcccgttttcctccagaaagctgctcccaagaagaggcttcagagaggggtccccaagaagaggttctggagagagatgctgcaggggaaaaggaagatgaggaggatgaagagattgtgagtcccccacctgtagaaagtgaggctgcccagtcctgccaccccaaacctgtcagttctgatactgaggatgtgaccaagaggaagaatcacaacttcctggagcgcaagaggcggaatgacctgcgttcgcgattcttggcgctgagggaccaggtgcccaccctggccagctgctccaaggcccccaaagtagtgatcctaagcaaggccttggaatacttgcaagccctggtgggggctgagaagaggatggctacagagaaaagacagctccgatgccggcagcagcagttgcagaaaagaattgcatacctcactggctactaactgaccaaaaagcctgacagttctgtcttacgaagacacaagtttattttttaacctccctctcccctttagtaatttgcacattttggttatggtgggacagtctggacagtagatcccagaatgcattgcagccggtgcacacacaataaaggcttgcattcttggaaaccttgaaacccagctctccctcttccctgactcatgggagtgctgtatgttctctggcgcctttggcttcccagcaggcagctgactgaggagccttggggtctgcctagctcactagctctgaagaaaaggctgacagatgctatgcaacaggtggtggatgttgtcaggggctccagcctgcatgaaatctcacactctgcatgagctttaggctaggaaaggatgctcccaactggtgtctctggggtgatgcaaggacagctgggcctggatgctctccctgaggctcctttttccagaagacacacgagctgtcttgggtgaagacaagcttgcagacttgatcaacattgaccattacctcactgtcagacactttacagtagccaaggagttggaaacctttatatattatgatgttagctgacccccttcctcccactcccaatgctgcgaccctgggaacacttaaaaagcttggcctctagattctttgtctcagagccctctgggctctctcctctgagggagggacctttctttcctcacaagggacttttttgttccattatgccttgttatgcaatgggctctacagcaccctttcccacaggtcagaaatatttccccaagacacagggaaatcggtcctagcctggggcctggggatagcttggagtcctggcccatgaacttgatccctgcccaggtgttttccgaggggcacttgaggcccagtcttttctcaaggcaggtgtaagacacctcagagggagaactgtactgctgcctctttcccacctgcctcatctcaatccttgagcggcaagtttgaagttcttctggaaccatgcaaatctgtcctcctcatgcaattccaaggagcttgctggctctgcagccacccttgggccccttccagcctgccatgaatcagatatctttcccagaatctgggcgtttctgaagttttggggagagctgttgggactcatccagtgctccagaaggtggacttgcttctggtgggttttaaaggagcctccaggagatatgcttagccaaccatgatggattttaccccagctggactcggcagctccaagtggaatccacgtgcagcttctagtctgggaaagtcacccaacctagcagttgtcatgtgggtaacctcaggcacctctaagcctgtcctggaagaaggaccagcagcccctccagaactctgcccaggacagcaggtgcctgctggctctgggtttggaagttggggtgggtagggggtggtaagtactatatatggctctggaaaaccagctgctacttccaaatctattgtccataatggtttctttctgaggttgcttcttggcctcagaggaccccaggggatgtttggaaatagcctctctacccttctggagcatggtttacaaaagccagctgacttctggaattgtctatggaggacagtttgggtgtaggttactgatgtctcaactgaatagcttgtgttttataagctgctgttggctattatgctgggggagtcttttttttttatattgtatttttgtatgccttttgcaaagtggtgttaactgtttttgtacaaggaaaaaaactcttggggcaatttcctgttgcaagggtctgatttattttgaaaggcaagttcacctgaaattttgtatttagttgtgattactgattgcctgattttaaaatgttgccttctgggacatcttctaataaaagatttctcaaacatg

SEQ ID NO: 174 - DNA, 1059 bp, Homo sapiens
  gene (1)..(1059): Accession No. NM_005009
cgcgctcacagcggcccgcgggccgggcgtcatgggcggcctcttctggcgctccgcgctgcgggggctgcgctgcggcccgcgggccccgggcccgagcctgctagtgcgccacggctcgggagggccctcctggacccgggagcggaccctggtggcggtgaagcccgatggcgtgcaacggcggctcgttggggacgtgatccagcgctttgagaggcggggcttcacgctggtggggatgaagatgctgcaggcaccagagagcgtccttgccgagcactaccaggacctgcggaggaagcccttctaccctgccctcatccgctacatgagctctgggcctgtggtggccatggtctgggaagggtacaatgtcgtccgcgcctcgagggccatgattggacacaccgactcggctgaggctgccccaggaaccataaggggtgacttcagcgtccacatcagcaggaatgtcatccacgccagcgactccgtggagggggcccagcgggagatccagctgtggttccagagcagtgagctggtgagctgggcagacgggggccagcacagcagcatccacccagcctgaggctcaagctgcccttaccaccccatcccccacgcaggaccaactacctccgtcagcaagaacccaagcccacatccaaacctgcctgtcccaaaccacttacttccctgttcacctctgccccaccccagcccagaggagtttgagccaccaacttcagtgcctttctgtaccccaagccagcacaagattggaccaatcctttttgcaccaaagtgccggacaacctttgtggtgggggggggtcttcacattatcataacctctcctctaaaggggaggcattaaaattcactgtgcccagcacatgggtggtacactaattatgacttcccccagctctgaggtagaaatgacgcctttatgcaagttgtaaggagttgaacagtaaagaggaagttttgcacacccaaaaaaaaaaaaaaaaaaaaaaaaaaaaaaaaaaaaaaaaaaaaaaaaaaaaa

SEQ ID NO: 175 - DNA, 11433 bp, Homo sapiens
  gene (1)..(11433): Accession No. NM_024408
aggctgcttcgttgcacacccgagaaagtttcagccaaacttcgggcggcggctgaggcggcggccgaggagcggcggactcggggcgcggggagtcgaggcatttgcgcctgggcttcggagcgtagcgccagggcctgagcctttgaagcaggaggaggggaggagagagtggggctcctctatcgggaccccctccccatgtggatctgcccaggcggcggcggcggcggcggaggaggaggcgaccgagaagatgcccgccctgcgccccgctctgctgtgggcgctgctggcgctctggctgtgctgcgcggcccccgcgcatgcattgcagtgtcgagatggctatgaaccctgtgtaaatgaaggaatgtgtgttacctaccacaatggcacaggatactgcaaatgtccagaaggcttcttgggggaatattgtcaacatcgagacccctgtgagaagaaccgctgccagaatggtgggacttgtgtggcccaggccatgctggggaaagccacgtgccgatgtgcctcagggtttacaggagaggactgccagtactcaacatctcatccatgctttgtgtctcgaccctgcctgaatggcggcacatgccatatgctcagccgggatacctatgagtgcacctgtcaagtcgggtttacaggtaaggagtgccaatggacggatgcctgcctgtctcatccctgtgcaaatggaagtacctgtaccactgtggccaaccagttctcctgcaaatgcctcacaggcttcacagggcagaaatgtgagactgatgtcaatgagtgtgacattccaggacactgccagcatggtggcacctgcctcaacctgcctggttcctaccagtgccagtgccctcagggcttcacaggccagtactgtgacagcctgtatgtgccctgtgcaccctcaccttgtgtcaatggaggcacctgtcggcagactggtgacttcacttttgagtgcaactgccttccaggttttgaagggagcacctgtgagaggaatattgatgactgccctaaccacaggtgtcagaatggaggggtttgtgtggatggggtcaacacttacaactgccgctgtcccccacaatggacaggacagttctgcacagaggatgtggatgaatgcctgctgcagcccaatgcctgtcaaaatgggggcacctgtgccaaccgcaatggaggctatggctgtgtatgtgtcaacggctggagtggagatgactgcagtgagaacattgatgattgtgccttcgcctcctgtactccaggctccacctgcatcgaccgtgtggcctccttctcttgcatgtgcccagaggggaaggcaggtctcctgtgtcatctggatgatgcatgcatcagcaatccttgccacaagggggcactgtgtgacaccaaccccctaaatgggcaatatatttgcacctgcccacaaggctacaaaggggctgactgcacagaagatgtggatgaatgtgccatggccaatagcaatccttgtgagcatgcaggaaaatgtgtgaacacggatggcgccttccactgtgagtgtctgaagggttatgcaggacctcgttgtgagatggacatcaatgagtgccattcagacccctgccagaatgatgctacctgtctggataagattggaggcttcacatgtctgtgcatgccaggtttcaaaggtgtgcattgtgaattagaaataaatgaatgtcagagcaacccttgtgtgaacaatgggcagtgtgtggataaagtcaatcgtttccagtgcctgtgtcctcctggtttcactgggccagtttgccagattgatattgatgactgttccagtactccgtgtctgaatggggcaaagtgtatcgatcacccgaatggctatgaatgccagtgtgccacaggtttcactggtgtgttgtgtgaggagaacattgacaactgtgaccccgatccttgccaccatggtcagtgtcaggatggtattgattcctacacctgcatctgcaatcccgggtacatgggcgccatctgcagtgaccagattgatgaatgttacagcagcccttgcctgaacgatggtcgctgcattgacctggtcaatggctaccagtgcaactgccagccaggcacgtcaggggttaattgtgaaattaattttgatgactgtgcaagtaacccttgtatccatggaatctgtatggatggcattaatcgctacagttgtgtctgctcaccaggattcacagggcagagatgtaacattgacattgatgagtgtgcctccaatccctgtcgcaagggtgcaacatgtatcaacggtgtgaatggtttccgctgtatatgccccgagggaccccatcaccccagctgctactcacaggtgaacgaatgcctgagcaatccctgcatccatggaaactgtactggaggtctcagtggatataagtgtctctgtgatgcaggctgggttggcatcaactgtgaagtggacaaaaatgaatgcctttcgaatccatgccagaatggaggaacttgtgacaatctggtgaatggatacaggtgtacttgcaagaagggctttaaaggctataactgccaggtgaatattgatgaatgtgcctcaaatccatgcctgaaccaaggaacctgctttgatgacataagtggctacacttgccactgtgtgctgccatacacaggcaagaattgtcagacagtattggctccctgttccccaaacccttgtgagaatgctgctgtttgcaaagagtcaccaaattttgagagttatacttgcttgtgtgctcctggctggcaaggtcagcggtgtaccattgacattgacgagtgtatctccaagccctgcatgaaccatggtctctgccataacacccagggcagctacatgtgtgaatgtccaccaggcttcagtggtatggactgtgaggaggacattgatgactgccttgccaatccttgccagaatggaggttcctgtatggatggagtgaatactttctcctgcctctgccttccgggtttcactggggataagtgccagacagacatgaatgagtgtctgagtgaaccctgtaagaatggagggacctgctctgactacgtcaacagttacacttgcaagtgccaggcaggatttgatggagtccattgtgagaacaacatcaatgagtgcactgagagctcctgtttcaatggtggcacatgtgttgatgggattaactccttctcttgcttgtgccctgtgggtttcactggatccttctgcctccatgagatcaatgaatgcagctctcatccatgcctgaatgagggaacgtgtgttgatggcctgggtacctaccgctgcagctgccccctgggctacactgggaaaaactgtcagaccctggtgaatctctgcagtcggtctccatgtaaaaacaaaggtacttgcgttcagaaaaaagcagagtcccagtgcctatgtccatctggatgggctggtgcctattgtgacgtgcccaatgtctcttgtgacatagcagcctccaggagaggtgtgcttgttgaacacttgtgccagcactcaggtgtctgcatcaatgctggcaacacgcattactgtcagtgccccctgggctatactgggagctactgtgaggagcaactcgatgagtgtgcgtccaacccctgccagcacggggcaacatgcagtgacttcattggtggatacagatgcgagtgtgtcccaggctatcagggtgtcaactgtgagtatgaagtggatgagtgccagaatcagccctgccagaatggaggcacctgtattgaccttgtgaaccatttcaagtgctcttgcccaccaggcactcggggcctactctgtgaagagaacattgatgactgtgcccggggtccccattgccttaatggtggtcagtgcatggataggattggaggctacagttgtcgctgcttgcctggctttgctggggagcgttgtgagggagacatcaacgagtgcctctccaacccctgcagctctgagggcagcctggactgtatacagctcaccaatgactacctgtgtgtttgccgtagtgcctttactggccggcactgtgaaaccttcgtcgatgtgtgtccccagatgccctgcctgaatggagggacttgtgctgtggccagtaacatgcctgatggtttcatttgccgttgtcccccgggattttccggggcaaggtgccagagcagctgtggacaagtgaaatgtaggaagggggagcagtgtgtgcacaccgcctctggaccccgctgcttctgccccagtccccgggactgcgagtcaggctgtgccagtagcccctgccagcacgggggcagctgccaccctcagcgccagcctccttattactcctgccagtgtgccccaccattctcgggtagccgctgtgaactctacacggcaccccccagcacccctcctgccacctgtctgagccagtattgtgccgacaaagctcgggatggcgtctgtgatgaggcctgcaacagccatgcctgccagtgggatgggggtgactgttctctcaccatggagaacccctgggccaactgctcctccccacttccctgctgggattatatcaacaaccagtgtgatgagctgtgcaacacggtcgagtgcctgtttgacaactttgaatgccaggggaacagcaagacatgcaagtatgacaaatactgtgcagaccacttcaaagacaaccactgtgaccaggggtgcaacagtgaggagtgtggttgggatgggctggactgtgctgctgaccaacctgagaacctggcagaaggtaccctggttattgtggtattgatgccacctgaacaactgctccaggatgctcgcagcttcttgcgggcactgggtaccctgctccacaccaacctgcgcattaagcgggactcccagggggaactcatggtgtacccctattatggtgagaagtcagctgctatgaagaaacagaggatgacacgcagatcccttcctggtgaacaagaacaggaggtggctggctctaaagtctttctggaaattgacaaccgccagtgtgttcaagactcagaccactgcttcaagaacacggatgcagcagcagctctcctggcctctcacgccatacaggggaccctgtcataccctcttgtgtctgtcgtcagtgaatccctgactccagaacgcactcagctcctctatctccttgctgttgctgttgtcatcattctgtttattattctgctgggggtaatcatggcaaaacgaaagcgtaagcatggctctctctggctgcctgaaggtttcactcttcgccgagatgcaagcaatcacaagcgtcgtgagccagtgggacaggatgctgtggggctgaaaaatctctcagtgcaagtctcagaagctaacctaattggtactggaacaagtgaacactgggtcgatgatgaagggccccagccaaagaaagtaaaggctgaagatgaggccttactctcagaagaagatgaccccattgatcgacggccatggacacagcagcaccttgaagctgcagacatccgtaggacaccatcgctggctctcacccctcctcaggcagagcaggaggtggatgtgttagatgtgaatgtccgtggcccagatggctgcaccccattgatgttggcttctctccgaggaggcagctcagatttgagtgatgaagatgaagatgcagaggactcttctgctaacatcatcacagacttggtctaccagggtgccagcctccaggcccagacagaccggactggtgagatggccctgcaccttgcagcccgctactcacgggctgatgctgccaagcgtctcctggatgcaggtgcagatgccaatgcccaggacaacatgggccgctgtccactccatgctgcagtggcagctgatgcccaaggtgtcttccagattctgattcgcaaccgagtaactgatctagatgccaggatgaatgatggtactacacccctgatcctggctgcccgcctggctgtggagggaatggtggcagaactgatcaactgccaagcggatgtgaatgcagtggatgaccatggaaaatctgctcttcactgggcagctgctgtcaataatgtggaggcaactcttttgttgttgaaaaatggggccaaccgagacatgcaggacaacaaggaagagacacctctgtttcttgctgcccgggaggggagctatgaagcagccaagatcctgttagaccattttgccaatcgagacatcacagaccatatggatcgtcttccccgggatgtggctcgggatcgcatgcaccatgacattgtgcgccttctggatgaatacaatgtgaccccaagccctccaggcaccgtgttgacttctgctctctcacctgtcatctgtgggcccaacagatctttcctcagcctgaagcacaccccaatgggcaagaagtctagacggcccagtgccaagagtaccatgcctactagcctccctaaccttgccaaggaggcaaaggatgccaagggtagtaggaggaagaagtctctgagtgagaaggtccaactgtctgagagttcagtaactttatcccctgttgattccctagaatctcctcacacgtatgtttccgacaccacatcctctccaatgattacatcccctgggatcttacaggcctcacccaaccctatgttggccactgccgcccctcctgccccagtccatgcccagcatgcactatctttttctaaccttcatgaaatgcagcctttggcacatggggccagcactgtgcttccctcagtgagccagttgctatcccaccaccacattgtgtctccaggcagtggcagtgctggaagcttgagtaggctccatccagtcccagtcccagcagattggatgaaccgcatggaggtgaatgagacccagtacaatgagatgtttggtatggtcctggctccagctgagggcacccatcctggcatagctccccagagcaggccacctgaagggaagcacataaccacccctcgggagcccttgccccccattgtgactttccagctcatccctaaaggcagtattgcccaaccagcgggggctccccagcctcagtccacctgccctccagctgttgcgggccccctgcccaccatgtaccagattccagaaatggcccgtttgcccagtgtggctttccccactgccatgatgccccagcaggacgggcaggtagctcagaccattctcccagcctatcatcctttcccagcctctgtgggcaagtaccccacacccccttcacagcacagttatgcttcctcaaatgctgctgagcgaacacccagtcacagtggtcacctccagggtgagcatccctacctgacaccatccccagagtctcctgaccagtggtcaagttcatcaccccactctgcttctgactggtcagatgtgaccaccagccctacccctgggggtgctggaggaggtcagcggggacctgggacacacatgtctgagccaccacacaacaacatgcaggtttatgcgtgagagagtccacctccagtgtagagacataactgacttttgtaaatgctgctgaggaacaaatgaaggtcatccgggagagaaatgaagaaatctctggagccagcttctagaggtaggaaagagaagatgttcttattcagataatgcaagagaagcaattcgtcagtttcactgggtatctgcaaggcttattgattattctaatctaataagacaagtttgtggaaatgcaagatgaatacaagccttgggtccatgtttactctcttctatttggagaataagatggatgcttattgaagcccagacattcttgcagcttggactgcattttaagccctgcaggcttctgccatatccatgagaagattctacactagcgtcctgttgggaattatgccctggaattctgcctgaattgacctacgcatctcctcctccttggacattcttttgtcttcatttggtgcttttggttttgcacctctccgtgattgtagccctaccagcatgttatagggcaagacctttgtgcttttgatcattctggcccatgaaagcaactttggtctcctttcccctcctgtcttcccggtatcccttggagtctcacaaggtttactttggtatggttctcagcacaaacctttcaagtatgttgtttctttggaaaatggacatactgtattgtgttctcctgcatatatcattcctggagagagaaggggagaagaatacttttcttcaacaaattttgggggcaggagatcccttcaagaggctgcaccttaatttttcttgtctgtgtgcaggtcttcatataaactttaccaggaagaagggtgtgagtttgttgtttttctgtgtatgggcctggtcagtgtaaagttttatccttgatagtctagttactatgaccctccccacttttttaaaaccagaaaaaggtttggaatgttggaatgaccaagagacaagttaactcgtgcaagagccagttacccacccacaggtccccctacttcctgccaagcattccattgactgcctgtatggaacacatttgtcccagatctgagcattctaggcctgtttcactcactcacccagcatatgaaactagtcttaactgttgagcctttcctttcatatccacagaagacactgtctcaaatgttgtacccttgccatttaggactgaactttccttagcccaagggacccagtgacagttgtcttccgtttgtcagatgatcagtctctactgattatcttgctgcttaaaggcctgctcaccaatctttctttcacaccgtgtggtccgtgttactggtatacccagtatgttctcactgaagacatggactttatatgttcaagtgcaggaattggaaagttggacttgttttctatgatccaaaacagccctataagaaggttggaaaaggaggaactatatagcagcctttgctattttctgctaccatttcttttcctctgaagcggccatgacattccctttggcaactaacgtagaaactcaacagaacattttcctttcctagagtcaccttttagatgataatggacaactatagacttgctcattgttcagactgattgcccctcacctgaatccactctctgtattcatgctcttggcaatttctttgactttcttttaagggcagaagcattttagttaattgtagataaagaatagttttcttcctcttctccttgggccagttaataattggtccatggctacactgcaacttccgtccagtgctgtgatgcccatgacacctgcaaaataagttctgcctgggcattttgtagatattaacaggtgaattcccgactcttttggtttgaatgacagttctcattccttctatggctgcaagtatgcatcagtgcttcccacttacctgatttgtctgtcggtggccccatatggaaaccctgcgtgtctgttggcataatagtttacaaatggttttttcagtcctatccaaatttattgaaccaacaaaaataattacttctgccctgagataagcagattaagtttgttcattctctgctttattctctccatgtggcaacattctgtcagcctctttcatagtgtgcaaacattttatcattctaaatggtgactctctgcccttggacccatttattattcacagatggggagaacctatctgcatggacctctgtggaccacagcgtacctgcccctttctgccctcctgctccagccccacttctgaaagtatcagctactgatccagccactggatattttatatcctcccttttccttaagcacaatgtcagaccaaattgcttgtttctttttcttggactactttaatttggatcctttgggtttggagaaagggaatgtgaaagctgtcattacagacaacaggtttcagtgatgaggaggacaacactgcctttcaaactttttactgatctcttagattttaagaactcttgaattgtgtggtatctaataaaagggaaggtaagatggataatcactttctcatttgggttctgaattggagactcagtttttatgagacacatcttttatgccatgtatagatcctcccctgctatttttggtttatttttattgttataaatgctttctttctttgactcctcttctgcctgcctttggggataggtttttttgtttgtttatttgcttcctctgttttgttttaagcatcattttcttatgtgaggtggggaagggaaaggtatgagggaaagagagtctgagaattaaaatattttagtataagcaattggctgtgatgctcaaatccattgcatcctcttattgaatttgccaatttgtaatttttgcataataaagaaccaaaggtgtaatgttttgttgagaggtggtttagggattttggccctaaccaatacattgaatgtatgatgactatttgggaggacacatttatgtacccagaggcccccactaataagtggtactatggttacttccttgtgtacatttctcttaaaagtgatattatatctgtttgtatgagaaacccagtaaccaataaaatgaccgcatattcctgactaaacgtagtaaggaaaatgcacactttgtttttacttttccgtttcattctaaaggtagttaagatgaaatttatatgaaagcatttttatcacaaaataaaaaaggtttgccaagctcagtggtgttgtattttttattttccaatactgcatccatggcctggcagtgttacctcatgatgtcataatttgctgagagagcaaattttcttttctttctgaatcccacaaagcctagcaccaaacttctttttttcttcctttaattagatcataaataaatgatcctggggaaaaagcatctgtcaaataggaaacatcacaaaactgagcactcttctgtgcactagccatagctggtgacaaacagatggttgctcagggacaaggtgccttccaatggaaatgcgaagtagttgctatagcaagaattgggaactgggatataagtcataatattaattatgctgttatgtaaatgattggtttgtaacattccttaagtgaaatttgtgtagaacttaatatacaggattataaaataatattttgtgtataaatttgttataagttcacattcatacatttatttataaagtcagtgagatatttgaacatgaaaaaaaaaa

SEQ ID NO: 176 - DNA, 6762 bp, Homo sapiens
  gene (1)..(6762): Accession No. NM_004557
agacgtgaggcttgcagcaggccgaggaggaagaagaggggcagtgggagcagaggaggtggctcctgccccagtgagagctctgagggtccctgcctgaagagggacagggaccggggcttggagaaggggctgtggaatgcagcccccttcactgctgctgctgctgctgctgctgctgctgctatgtgtctcagtggtcagacccagagggctgctgtgtgggagtttcccagaaccctgtgccaatggaggcacctgcctgagcctgtctctgggacaagggacctgccagtgtgcccctggcttcctgggtgagacgtgccagtttcctgacccctgccagaacgcccagctctgccaaaatggaggcagctgccaagccctgcttcccgctcccctagggctccccagctctccctctccattgacacccagcttcttgtgcacttgcctccctggcttcactggtgagagatgccaggccaagcttgaagacccttgtcctccctccttctgttccaaaaggggccgctgccacatccaggcctcgggccgcccacagtgctcctgcatgcctggatggacaggtgagcagtgccagcttcgggacttctgttcagccaacccatgtgttaatggaggggtgtgtctggccacatacccccagatccagtgccactgcccaccgggcttcgagggccatgcctgtgaacgtgatgtcaacgagtgcttccaggacccaggaccctgccccaaaggcacctcctgccataacaccctgggctccttccagtgcctctgccctgtggggcaggagggtccacgttgtgagctgcgggcaggaccctgccctcctaggggctgttcgaatgggggcacctgccagctgatgccagagaaagactccacctttcacctctgcctctgtcccccaggtttcataggcccagactgtgaggtgaatccagacaactgtgtcagccaccagtgtcagaatgggggcacttgccaggatgggctggacacctacacctgcctctgcccagaaacctggacaggctgggactgctccgaagatgtggatgagtgtgagacccagggtccccctcactgcagaaacgggggcacctgccagaactctgctggtagctttcactgcgtgtgtgtgagtggctggggcggcacaagctgtgaggagaacctggatgactgtattgctgccacctgtgccccgggatccacctgcattgaccgggtgggctctttctcctgcctctgcccacctggacgcacaggactcctgtgccacttggaagacatgtgtctgagccagccgtgccatggggatgcccaatgcagcaccaaccccctcacaggctccacactctgcctgtgtcagcctggctattcggggcccacctgccaccaggacctggacgagtgtctgatggcccagcaaggcccaagtccctgtgaacatggcggttcctgcctcaacactcctggctccttcaactgcctctgtccacctggctacacaggctcccgttgtgaggctgatcacaatgagtgcctctcccagccctgccacccaggaagcacctgtctggacctacttgccaccttccactgcctctgcccgccaggcttagaagggcagctctgtgaggtggagaccaacgagtgtgcctcagctccctgcctgaaccacgcggattgccatgacctgctcaacggcttccagtgcatctgcctgcctggattctccggcacccgatgtgaggaggatatcgatgagtgcagaagctctccctgtgccaatggtgggcagtgccaggaccagcctggagccttccactgcaagtgtctcccaggctttgaagggccacgctgtcaaacagaggtggatgagtgcctgagtgacccatgtcccgttggagccagctgccttgatcttccaggagccttcttttgcctctgcccctctggtttcacaggccagctctgtgaggttcccctgtgtgctcccaacctgtgccagcccaagcagatatgtaaggaccagaaagacaaggccaactgcctctgtcctgatggaagccctggctgtgccccacctgaggacaactgcacctgccaccacgggcactgccagagatcctcatgtgtgtgtgacgtgggttggacggggccagagtgtgaggcagagctagggggctgcatctctgcaccctgtgcccatggggggacctgctacccccagccctctggctacaactgcacctgccctacaggctacacaggacccacctgtagtgaggagatgacagcttgtcactcagggccatgtctcaatggcggctcctgcaaccctagccctggaggctactactgcacctgccctccaagccacacagggccccagtgccaaaccagcactgactactgtgtgtctgccccgtgcttcaatgggggtacctgtgtgaacaggcctggcaccttctcctgcctctgtgccatgggcttccagggcccgcgctgtgagggaaagctccgccccagctgtgcagacagcccctgtaggaatagggcaacctgccaggacagccctcagggtccccgctgcctctgccccactggctacaccggaggcagctgccagactctgatggacttatgtgcccagaagccctgcccacgcaattcccactgcctccagactgggccctccttccactgcttgtgcctccagggatggaccgggcctctctgcaaccttccactgtcctcctgccagaaggctgcactgagccaaggcatagacgtctcttccctttgccacaatggaggcctctgtgtcgacagcggcccctcctatttctgccactgcccccctggattccaaggcagcctgtgccaggatcacgtgaacccatgtgagtccaggccttgccagaacggggccacctgcatggcccagcccagtgggtatctctgccagtgtgccccaggctacgatggacagaactgctcaaaggaactcgatgcttgtcagtcccaaccctgtcacaaccatggaacctgtactcccaaacctggaggattccactgtgcctgccctccaggctttgtggggctacgctgtgagggagacgtggacgagtgtctggaccagccctgccaccccacaggcactgcagcctgccactctctggccaatgccttctactgccagtgtctgcctggacacacaggccagtggtgtgaggtggagatagacccctgccacagccaaccctgctttcatggagggacctgtgaggccacagcaggatcacccctgggtttcatctgccactgccccaagggttttgaaggccccacctgcagccacagggccccttcctgcggcttccatcactgccaccacggaggcctgtgtctgccctcccctaagccaggcttcccaccacgctgtgcctgcctcagtggctatgggggtcctgactgcctgaccccaccagctcctaaaggctgtggccctccctccccatgcctatacaatggcagctgctcagagaccacgggcttggggggcccaggctttcgatgctcctgccctcacagctctccagggccccggtgtcagaaacccggagccaaggggtgtgagggcagaagtggagatggggcctgcgatgctggctgcagtggcccgggaggaaactgggatggaggggactgctctctgggagtcccagacccctggaagggctgcccctcccactctcggtgctggcttctcttccgggacgggcagtgccacccacagtgtgactctgaagagtgtctgtttgatggctacgactgtgagacccctccagcctgcactccagcctatgaccagtactgccatgatcacttccacaacgggcactgtgagaaaggctgcaacactgcagagtgtggctgggatggaggtgactgcaggcctgaagatggggacccagagtgggggccctccctggccctgctggtggtactgagccccccagccctagaccagcagctgtttgccctggcccgggtgctgtccctgactctgagggtaggactctgggtaaggaaggatcgtgatggcagggacatggtgtacccctatcctggggcccgggctgaagaaaagctaggaggaactcgggaccccacctatcaggagagagcagcccctcaaacgcagcccctgggcaaggagaccgactccctcagtgctgggtttgtggtggtcatgggtgtggatttgtcccgctgtggccctgaccacccggcatcccgctgtccctgggaccctgggcttctactccgcttccttgctgcgatggctgcagtgggagccctggagcccctgctgcctggaccactgctggctgtccaccctcatgcagggaccgcaccccctgccaaccagcttccctggcctgtgctgtgctccccagtggccggggtgattctcctggccctaggggctcttctcgtcctccagctcatccggcgtcgacgccgagagcatggagctctctggctgccccctggtttcactcgacggcctcggactcagtcagctccccaccgacgccggcccccactaggcgaggacagcattggtctcaaggcactgaagccaaaggcagaagttgatgaggatggagttgtgatgtgctcaggccctgaggagggagaggaggtgggccaggctgaagaaacaggcccaccctccacgtgccagctctggtctctgagtggtggctgtggggcgctccctcaggcagccatgctaactcctccccaggaatctgagatggaagcccctgacctggacacccgtggacctgatggggtgacacccctgatgtcagcagtttgctgtggggaagtacagtccgggaccttccaaggggcatggttgggatgtcctgagccctgggaacctctgctggatggaggggcctgtccccaggctcacaccgtgggcactggggagacccccctgcacctggctgcccgattctcccggccaaccgctgcccgccgcctccttgaggctggagccaaccccaaccagccagaccgggcagggcgcacaccccttcatgctgctgtggctgctgatgctcgggaggtctgccagcttctgctccgtagcagacaaactgcagtggacgctcgcacagaggacgggaccacacccttgatgctggctgccaggctggcggtggaagacctggttgaagaactgattgcagcccaagcagacgtgggggccagagataaatgggggaaaactgcgctgcactgggctgctgccgtgaacaacgcccgagccgcccgctcgcttctccaggccggagccgataaagatgcccaggacaacagggagcagacgccgctattcctggcggcgcgggaaggagcggtggaagtagcccagctactgctggggctgggggcagcccgagagctgcgggaccaggctgggctagcgccggcggacgtcgctcaccaacgtaaccactgggatctgctgacgctgctggaaggggctgggccaccagaggcccgtcacaaagccacgccgggccgcgaggctgggcccttcccgcgcgcacggacggtgtcagtaagcgtgcccccgcatgggggcggggctctgccgcgctgccggacgctgtcagccggagcaggccctcgtgggggcggagcttgtctgcaggctcggacttggtccgtagacttggctgcgcgggggggcggggcctattctcattgccggagcctctcgggagtaggagcaggaggaggcccgacccctcgcggccgtaggttttctgcaggcatgcgcgggcctcggcccaaccctgcgataatgcgaggaagatacggagtggctgccgggcgcggaggcagggtctcaacggatgactggccctgtgattgggtggccctgggagcttgcggttctgcctccaacattccgatcccgcctccttgccttactccgtccccggagcggggatcacctcaacttgactgtggtcccccagccctccaagaaatgcccataaaccaaggaggagagggtaaaaaatagaagaatacatggtagggaggaattccaaaaatgattacccattaaaaggcaggctggaaggccttcctggttttaagatggatcccccaaaatgaagggttgtgagtttagtttctctcctaaaatgaatgtatgcccaccagagcagacatcttccacgtggagaagctgcagctctggaaagagggtttaagatgctaggatgaggcaggcccagtcctcctccagaaaataagacaggccacaggagggcagagtggagtggaaatacccctaagttggaaccaagaattgcaggcatatgggatgtaagatgttctttcctatatatggtttccaaagggtgcccctatgatccattgtccccactgcccacaaatggctgacaaatatttattgggcacctactatgtgccaggcactgtgtaggtgctgaaaagtggccaagggccacccccgctgatgactccttgcattccctcccctcacaacaaagaactccactgtggggatgaagcgcttcttctagccactgctatcgctatttaagaaccctaaatctgtcacccataataaagctgatttgaagtgttaaaaaaaaaaaaaaaaaa

SEQ ID NO: 177 - DNA, 4461 bp, Homo sapiens
  gene (1)..(4461): Accession No. NM_002524
gaaacgtcccgtgtgggaggggcgggtctgggtgcggcctgccgcatgactcgtggttcggaggcccacgtggccggggcggggactcaggcgcctggggcgccgactgattacgtagcgggcggggccggaagtgccgctccttggtgggggctgttcatggcggttccggggtctccaacatttttcccggctgtggtcctaaatctgtccaaagcagaggcagtggagcttgaggttcttgctggtgtgaaatgactgagtacaaactggtggtggttggagcaggtggtgttgggaaaagcgcactgacaatccagctaatccagaaccactttgtagatgaatatgatcccaccatagaggattcttacagaaaacaagtggttatagatggtgaaacctgtttgttggacatactggatacagctggacaagaagagtacagtgccatgagagaccaatacatgaggacaggcgaaggcttcctctgtgtatttgccatcaataatagcaagtcatttgcggatattaacctctacagggagcagattaagcgagtaaaagactcggatgatgtacctatggtgctagtgggaaacaagtgtgatttgccaacaaggacagttgatacaaaacaagcccacgaactggccaagagttacgggattccattcattgaaacctcagccaagaccagacagggtgttgaagatgctttttacacactggtaagagaaatacgccagtaccgaatgaaaaaactcaacagcagtgatgatgggactcagggttgtatgggattgccatgtgtggtgatgtaacaagatacttttaaagttttgtcagaaaagagccactttcaagctgcactgacaccctggtcctgacttccctggaggagaagtattcctgttgctgtcttcagtctcacagagaagctcctgctacttccccagctctcagtagtttagtacaataatctctatttgagaagttctcagaataactacctcctcacttggctgtctgaccagagaatgcacctcttgttactccctgttatttttctgccctgggttcttccacagcacaaacacacctctgccaccccaggtttttcatctgaaaagcagttcatgtctgaaacagagaaccaaaccgcaaacgtgaaattctattgaaaacagtgtcttgagctctaaagtagcaactgctggtgattttttttttctttttactgttgaacttagaactatgctaatttttggagaaatgtcataaattactgttttgccaagaatatagttattattgctgtttggtttgtttataatgttatcggctctattctctaaactggcatctgctctagattcataaatacaaaaatgaatactgaattttgagtctatcctagtcttcacaactttgacgtaattaaatccaactttcacagtgaagtgcctttttcctagaagtggtttgtagacttcctttataatatttcagtggaatagatgtctcaaaaatccttatgcatgaaatgaatgtctgagatacgtctgtgacttatctaccattgaaggaaagctatatctatttgagagcagatgccattttgtacatgtatgaaattggttttccagaggcctgttttggggctttcccaggagaaagatgaaactgaaagcacatgaataatttcacttaataatttttacctaatctccacttttttcataggttactacctatacaatgtatgtaatttgtttcccctagcttactgataaacctaatattcaatgaacttccatttgtattcaaatttgtgtcataccagaaagctctacatttgcagatgttcaaatattgtaaaactttggtgcattgttatttaatagctgtgatcagtgattttcaaacctcaaatatagtatattaacaaattacattttcactgtatatcatggtatcttaatgatgtatataattgccttcaatccccttctcaccccaccctctacagcttcccccacagcaataggggcttgattatttcagttgagtaaagcatggtgctaatggaccagggtcacagtttcaaaacttgaacaatccagttagcatcacagagaaagaaattcttctgcatttgctcattgcaccagtaactccagctagtaattttgctaggtagctgcagttagccctgcaaggaaagaagaggtcagttagcacaaaccctttaccatgactggaaaactcagtatcacgtatttaaacatttttttttcttttagccatgtagaaactctaaattaagccaatattctcatttgagaatgaggatgtctcagctgagaaacgttttaaattctctttattcataatgttctttgaagggtttaaaacaagatgttgataaatctaagctgatgagtttgctcaaaacaggaagttgaaattgttgagacaggaatggaaaatataattaattgatacctatgaggatttggaggcttggcattttaatttgcagataataccctggtaattctcatgaaaaatagacttggataacttttgataaaagactaattccaaaatggccactttgttcctgtctttaatatctaaatacttactgaggtcctccatcttctatattatgaattttcatttattaagcaaatgtcatattaccttgaaattcagaagagaagaaacatatactgtgtccagagtataatgaacctgcagagttgtgcttcttactgctaattctgggagctttcacagtactgtcatcatttgtaaatggaaattctgcttttctgtttctgctccttctggagcagtgctactctgtaattttcctgaggcttatcacctcagtcatttcttttttaaatgtctgtgactggcagtgattctttttcttaaaaatctattaaatttgatgtcaaattagggagaaagatagttactcatcttgggctcttgtgccaatagcccttgtatgtatgtacttagagttttccaagtatgttctaagcacagaagtttctaaatggggccaaaattcagacttgagtatgttctttgaataccttaagaagttacaattagccgggcatggtggcccgtgcctgtagtcccagctacttgagaggctgaggcaggagaatcacttcaacccaggaggtggaggttacagtgagcagagatcgtgccactgcactccagcctgggtgacaagagagacttgtctccaaaaaaaaagttacacctaggtgtgaattttggcacaaaggagtgacaaacttatagttaaaagctgaataacttcagtgtggtataaaacgtggtttttaggctatgtttgtgattgctgaaaagaattctagtttacctcaaaatccttctctttccccaaattaagtgcctggccagctgtcataaattacatattccttttggtttttttaaaggttacatgttcaagagtgaaaataagatgttctgtctgaaggctaccatgccggatctgtaaatgaacctgttaaatgctgtatttgctccaacggcttactatagaatgttacttaatacaatatcatacttattacaatttttactataggagtgtaataggtaaaattaatctctattttagtgggcccatgtttagtctttcaccatcctttaaactgctgtgaatttttttgtcatgacttgaaagcaaggatagagaaacactttagagatatgtggggtttttttaccattccagagcttgtgagcataatcatatttgctttatatttatagtcatgaactcctaagttggcagctacaaccaagaaccaaaaaatggtgcgttctgcttcttgtaattcatctctgctaataaattataagaagcaaggaaaattagggaaaatattttatttggatggtttctataaacaagggactataattcttgtacattatttttcatctttgctgtttctttgagcagtctaatgtgccacacaattatctaaggtatttgttttctataagaattgttttaaaagtattcttgttaccagagtagttgtattatatttcaaaacgtaagatgatttttaaaagcctgagtactgacctaagatggaattgtatgaactctgctctggagggaggggaggatgtccgtggaagttgtaagacttttatttttttgtgccatcaaatataggtaaaaataattgtgcaattctgctgtttaaacaggaactattggcctccttggccctaaatggaagggccgatattttaagttgattattttattgtaaattaatccaacctagttctttttaatttggttgaatgttttttcttgttaaatgatgtttaaaaaataaaaactggaagttcttggcttagtcataattcttatattca

SEQ ID NO: 178 - DNA, 1355 bp, Homo sapiens
  gene (1)..(1355): Accession No. NM_002592
ggatggccggagctggcgccctggttctggaggtaaccggttactgagggcgagaagcgccacccggaggctctagcctgacaaatgcttgctgacctgggccagagctcttcccttacgcaagtctcagccggtcgtcgcgacgttcgcccgctcgctctgaggctcctgaagccgaaaccagctagactttcctccttcccgcctgcctgtagcggcgttgttgccactccgccaccatgttcgaggcgcgcctggtccagggctccatcctcaagaaggtgttggaggcactcaaggacctcatcaacgaggcctgctgggatattagctccagcggtgtaaacctgcagagcatggactcgtcccacgtctctttggtgcagctcaccctgcggtctgagggcttcgacacctaccgctgcgaccgcaacctggccatgggcgtgaacctcaccagtatgtccaaaatactaaaatgcgccggcaatgaagatatcattacactaagggccgaagataacgcggataccttggcgctagtatttgaagcaccaaaccaggagaaagtttcagactatgaaatgaagttgatggatttagatgttgaacaacttggaattccagaacaggagtacagctgtgtagtaaagatgccttctggtgaatttgcacgtatatgccgagatctcagccatattggagatgctgttgtaatttcctgtgcaaaagacggagtgaaattttctgcaagtggagaacttggaaatggaaacattaaattgtcacagacaagtaatgtcgataaagaggaggaagctgttaccatagagatgaatgaaccagttcaactaacttttgcactgaggtacctgaacttctttacaaaagccactccactctcttcaacggtgacactcagtatgtctgcagatgtaccccttgttgtagagtataaaattgcggatatgggacacttaaaatactacttggctcccaagatcgaggatgaagaaggatcttaggcattcttaaaattcaagaaaataaaactaagctctttgagaactgcttctaagatgccagcatatactgaagtcttttctgtcaccaaatttgtacctctaagtacatatgtagatattgttttctgtaaataacctatttttttctctattctctgcaatttgtttaaagaataaagtccaaagtcagatctggtctagttaacctagaagtatttttgtctcttagaaatacttgtgatttttataatacaaaagggtcttgactctaaatgcagttttaagaattgtttttgaatttaaataaagttacttgaatttcaaacatca

SEQ ID NO: 179 - DNA, 6574 bp, Homo sapiens
  gene (1)..(6574): Accession No. NM_006206
aagagcaaaaagcgaaggcgcaatctggacactgggagattcggagcgcagggagtttgagagaaacttttattttgaagagaccaaggttgagggggggcttatttcctgacagctatttacttagagcaaatgattagttttagaaggatggactataacattgaatcaattacaaaacgcggtttttgagcccattactgttggagctacagggagagaaacagaggaggagactgcaagagatcattggaggccgtgggcacgctctttactccatgtgtgggacattcattgcggaataacatcggaggagaagtttcccagagctatggggacttcccatccggcgttcctggtcttaggctgtcttctcacagggctgagcctaatcctctgccagctttcattaccctctatccttccaaatgaaaatgaaaaggttgtgcagctgaattcatccttttctctgagatgctttggggagagtgaagtgagctggcagtaccccatgtctgaagaagagagctccgatgtggaaatcagaaatgaagaaaacaacagcggcctttttgtgacggtcttggaagtgagcagtgcctcggcggcccacacagggttgtacacttgctattacaaccacactcagacagaagagaatgagcttgaaggcaggcacatttacatctatgtgccagacccagatgtagcctttgtacctctaggaatgacggattatttagtcatcgtggaggatgatgattctgccattataccttgtcgcacaactgatcccgagactcctgtaaccttacacaacagtgagggggtggtacctgcctcctacgacagcagacagggctttaatgggaccttcactgtagggccctatatctgtgaggccaccgtcaaaggaaagaagttccagaccatcccatttaatgtttatgctttaaaagcaacatcagagctggatctagaaatggaagctcttaaaaccgtgtataagtcaggggaaacgattgtggtcacctgtgctgtttttaacaatgaggtggttgaccttcaatggacttaccctggagaagtgaaaggcaaaggcatcacaatgctggaagaaatcaaagtcccatccatcaaattggtgtacactttgacggtccccgaggccacggtgaaagacagtggagattacgaatgtgctgcccgccaggctaccagggaggtcaaagaaatgaagaaagtcactatttctgtccatgagaaaggtttcattgaaatcaaacccaccttcagccagttggaagctgtcaacctgcatgaagtcaaacattttgttgtagaggtgcgggcctacccacctcccaggatatcctggctgaaaaacaatctgactctgattgaaaatctcactgagatcaccactgatgtggaaaagattcaggaaataaggtatcgaagcaaattaaagctgatccgtgctaaggaagaagacagtggccattatactattgtagctcaaaatgaagatgctgtgaagagctatacttttgaactgttaactcaagttccttcatccattctggacttggtcgatgatcaccatggctcaactgggggacagacggtgaggtgcacagctgaaggcacgccgcttcctgatattgagtggatgatatgcaaagatattaagaaatgtaataatgaaacttcctggactattttggccaacaatgtctcaaacatcatcacggagatccactcccgagacaggagtaccgtggagggccgtgtgactttcgccaaagtggaggagaccatcgccgtgcgatgcctggctaagaatctccttggagctgagaaccgagagctgaagctggtggctcccaccctgcgttctgaactcacggtggctgctgcagtcctggtgctgttggtgattgtgatcatctcacttattgtcctggttgtcatttggaaacagaaaccgaggtatgaaattcgctggagggtcattgaatcaatcagcccagatggacatgaatatatttatgtggacccgatgcagctgccttatgactcaagatgggagtttccaagagatggactagtgcttggtcgggtcttggggtctggagcgtttgggaaggtggttgaaggaacagcctatggattaagccggtcccaacctgtcatgaaagttgcagtgaagatgctaaaacccacggccagatccagtgaaaaacaagctctcatgtctgaactgaagataatgactcacctggggccacatttgaacattgtaaacttgctgggagcctgcaccaagtcaggccccatttacatcatcacagagtattgcttctatggagatttggtcaactatttgcataagaatagggatagcttcctgagccaccacccagagaagccaaagaaagagctggatatctttggattgaaccctgctgatgaaagcacacggagctatgttattttatcttttgaaaacaatggtgactacatggacatgaagcaggctgatactacacagtatgtccccatgctagaaaggaaagaggtttctaaatattccgacatccagagatcactctatgatcgtccagcctcatataagaagaaatctatgttagactcagaagtcaaaaacctcctttcagatgataactcagaaggccttactttattggatttgttgagcttcacctatcaagttgcccgaggaatggagtttttggcttcaaaaaattgtgtccaccgtgatctggctgctcgcaacgtcctcctggcacaaggaaaaattgtgaagatctgtgactttggcctggccagagacatcatgcatgattcgaactatgtgtcgaaaggcagtacctttctgcccgtgaagtggatggctcctgagagcatctttgacaacctctacaccacactgagtgatgtctggtcttatggcattctgctctgggagatcttttcccttggtggcaccccttaccccggcatgatggtggattctactttctacaataagatcaagagtgggtaccggatggccaagcctgaccacgctaccagtgaagtctacgagatcatggtgaaatgctggaacagtgagccggagaagagaccctccttttaccacctgagtgagattgtggagaatctgctgcctggacaatataaaaagagttatgaaaaaattcacctggacttcctgaagagtgaccatcctgctgtggcacgcatgcgtgtggactcagacaatgcatacattggtgtcacctacaaaaacgaggaagacaagctgaaggactgggagggtggtctggatgagcagagactgagcgctgacagtggctacatcattcctctgcctgacattgaccctgtccctgaggaggaggacctgggcaagaggaacagacacagctcgcagacctctgaagagagtgccattgagacgggttccagcagttccaccttcatcaagagagaggacgagaccattgaagacatcgacatgatggatgacatcggcatagactcttcagacctggtggaagacagcttcctgtaactggcggattcgaggggttccttccacttctggggccacctctggatcccgttcagaaaaccactttattgcaatgcagaggttgagaggaggacttggttgatgtttaaagagaagttcccagccaagggcctcggggagcgttctaaatatgaatgaatgggatattttgaaatgaactttgtcagtgttgcctcttgcaatgcctcagtagcatctcagtggtgtgtgaagtttggagatagatggataagggaataataggccacagaaggtgaactttgtgcttcaaggacattggtgagagtccaacagacacaatttatactgcgacagaacttcagcattgtaattatgtaaataactctaaccaaggctgtgtttagattgtattaactatcttctttggacttctgaagagaccactcaatccatccatgtacttccctcttgaaacctgatgtcagctgctgttgaactttttaaagaagtgcatgaaaaaccatttttgaaccttaaaaggtactggtactatagcattttgctatcttttttagtgttaaagagataaagaataataattaaccaaccttgtttaatagatttgggtcatttagaagcctgacaactcattttcatattgtaatctatgtttataatactactactgttatcagtaatgctaaatgtgtaataatgtaacatgatttccctccagagaaagcacaatttaaaacaatccttactaagtaggtgatgagtttgacagtttttgacatttatattaaataacatgtttctctataaagtatggtaatagctttagtgaattaaatttagttgagcatagagaacaaagtaaaagtagtgttgtccaggaagtcagaatttttaactgtactgaataggttccccaatccatcgtattaaaaaacaattaactgccctctgaaataatgggattagaaacaaacaaaactcttaagtcctaaaagttctcaatgtagaggcataaacctgtgctgaacataacttctcatgtatattacccaatggaaaatataatgatcagcaaaaagactggatttgcagaagttttttttttttttttcttcatgcctgatgaaagctttggcgaccccaatatatgtattttttgaatctatgaacctgaaaagggtcagaaggatgcccagacatcagcctccttctttcaccccttaccccaaagagaaagagtttgaaactcgagaccataaagatattctttagtggaggctggatgtgcattagcctggatcctcagttctcaaatgtgtgtggcagccaggatgactagatcctgggtttccatccttgagattctgaagtatgaagtctgagggaaaccagagtctgtatttttctaaactccctggctgttctgatcggccagttttcggaaacactgacttaggtttcaggaagttgccatgggaaacaaataatttgaactttggaacagggttggcattcaaccacgcaggaagcctactatttaaatccttggcttcaggttagtgacatttaatgccatctagctagcaattgcgaccttaatttaactttccagtcttagctgaggctgagaaagctaaagtttggttttgacaggttttccaaaagtaaagatgctacttcccactgtatgggggagattgaactttccccgtctcccgtcttctgcctcccactccataccccgccaaggaaaggcatgtacaaaaattatgcaattcagtgttccaagtctctgtgtaaccagctcagtgttttggtggaaaaaacattttaagttttactgataatttgaggttagatgggaggatgaattgtcacatctatccacactgtcaaacaggttggtgtgggttcattggcattctttgcaatactgcttaattgctgataccatatgaatgaaacatgggctgtgattactgcaatcactgtgctatcggcagatgatgctttggaagatgcagaagcaataataaagtacttgactacctactggtgtaatctcaatgcaagccccaactttcttatccaactttttcatagtaagtgcgaagactgagccagattggccaattaaaaacgaaaacctgactaggttctgtagagccaattagacttgaaatacgtttgtgtttctagaatcacagctcaagcattctgtttatcgctcactctcccttgtacagccttattttgttggtgctttgcattttgatattgctgtgagccttgcatgacatcatgaggccggatgaaacttctcagtccagcagtttccagtcctaacaaatgctcccacctgaatttgtatatgactgcatttgtgtgtgtgtgtgtgttttcagcaaattccagatttgtttccttttggcctcctgcaaagtctccagaagaaaatttgccaatctttcctactttctatttttatgatgacaatcaaagccggcctgagaaacactatttgtgactttttaaacgattagtgatgtccttaaaatgtggtctgccaatctgtacaaaatggtcctatttttgtgaagagggacataagataaaatgatgttatacatcaatatgtatatatgtatttctatatagacttggagaatactgccaaaacatttatgacaagctgtatcactgccttcgtttatatttttttaactgtgataatccccacaggcacattaactgttgcacttttgaatgtccaaaatttatattttagaaataataaaaagaaagatacttacatgttcccaaaacaatggtgtggtgaatgtgtgagaaaaactaacttgatagggtctaccaatacaaaatgtattacgaatgcccctgttcatgtttttgttttaaaacgtgtaaatgaagatctttatatttcaataaatgatatataatttaaagtta

SEQ ID NO: 180 - DNA, 2395 bp, Homo sapiens
  gene (1)..(2395): Accession No. NM_002658
atatagagcaggcgccgcgggtcgcagcacagtgcggagaccgcagccccggagcccgggccagggtccacctgtccccgcagcgccggctcgcgccctcctgccgcagccaccgagccgccgtctagcgccccgacctcgccaccatgagagccctgctggcgcgcctgcttctctgcgtcctggtcgtgagcgactccaaaggcagcaatgaacttcatcaagttccatcgaactgtgactgtctaaatggaggaacatgtgtgtccaacaagtacttctccaacattcactggtgcaactgcccaaagaaattcggagggcagcactgtgaaatagataagtcaaaaacctgctatgaggggaatggtcacttttaccgaggaaaggccagcactgacaccatgggccggccctgcctgccctggaactctgccactgtccttcagcaaacgtaccatgcccacagatctgatgctcttcagctgggcctggggaaacataattactgcaggaacccagacaaccggaggcgaccctggtgctatgtgcaggtgggcctaaagccgcttgtccaagagtgcatggtgcatgactgcgcagatggaaaaaagccctcctctcctccagaagaattaaaatttcagtgtggccaaaagactctgaggccccgctttaagattattgggggagaattcaccaccatcgagaaccagccctggtttgcggccatctacaggaggcaccgggggggctctgtcacctacgtgtgtggaggcagcctcatcagcccttgctgggtgatcagcgccacacactgcttcattgattacccaaagaaggaggactacatcgtctacctgggtcgctcaaggcttaactccaacacgcaaggggagatgaagtttgaggtggaaaacctcatcctacacaaggactacagcgctgacacgcttgctcaccacaacgacattgccttgctgaagatccgttccaaggagggcaggtgtgcgcagccatcccggactatacagaccatctgcctgccctcgatgtataacgatccccagtttggcacaagctgtgagatcactggctttggaaaagagaattctaccgactatctctatccggagcagctgaaaatgactgttgtgaagctgatttcccaccgggagtgtcagcagccccactactacggctctgaagtcaccaccaaaatgctgtgtgctgctgacccacagtggaaaacagattcctgccagggagactcagggggacccctcgtctgttccctccaaggccgcatgactttgactggaattgtgagctggggccgtggatgtgccctgaaggacaagccaggcgtctacacgagagtctcacacttcttaccctggatccgcagtcacaccaaggaagagaatggcctggccctctgagggtccccagggaggaaacgggcaccacccgctttcttgctggttgtcatttttgcagtagagtcatctccatcagctgtaagaagagactgggaagataggctctgcacagatggatttgcctgtgccacccaccagggcgaacgacaatagctttaccctcaggcataggcctgggtgctggctgcccagacccctctggccaggatggaggggtggtcctgactcaacatgttactgaccagcaacttgtctttttctggactgaagcctgcaggagttaaaaagggcagggcatctcctgtgcatgggtgaagggagagccagctcccccgacggtgggcatttgtgaggcccatggttgagaaatgaataatttcccaattaggaagtgtaacagctgaggtctcttgagggagcttagccaatgtgggagcagcggtttggggagcagagacactaacgacttcagggcagggctctgatattccatgaatgtatcaggaaatatatatgtgtgtgtatgtttgcacacttgtgtgtgggctgtgagtgtaagtgtgagtaagagctggtgtctgattgttaagtctaaatatttccttaaactgtgtggactgtgatgccacacagagtggtctttctggagaggttataggtcactcctggggcctcttgggtcccccacgtgacagtgcctgggaatgtattattctgcagcatgacctgtgaccagcactgtctcagtttcactttcacatagatgtccctttcttggccagttatcccttccttttagcctagttcatccaatcctcactgggtggggtgaggaccactcctgtacactgaatatttatatttcactatttttatttatatttttgtaattttaaataaaagtgatcaataaaatgtgatttttctgatgacaaaaaaaaaaaaaaaaaaaa

SEQ ID NO: 181 - DNA, 7957 bp, Homo sapiens
  gene (1)..(7957): Accession No. NM_000264
gcgcccgccgtgtgagcagcagcagcggctggtctgtcaaccggagcccgagcccgagcagcctgcggccagcagcgtcctcgcaagccgagcgcccaggcgcgccaggagcccgcagcagcggcagcagcgcgccgggccgcccgggaagcctccgtccccgcggcggcggcggcggcggcggcaacatggcctcggctggtaacgccgccgagccccaggaccgcggcggcggcggcagcggctgtatcggtgccccgggacggccggctggaggcgggaggcgcagacggacgggggggctgcgccgtgctgccgcgccggaccgggactatctgcaccggcccagctactgcgacgccgccttcgctctggagcagatttccaaggggaaggctactggccggaaagcgccgctgtggctgagagcgaagtttcagagactcttatttaaactgggttgttacattcaaaaaaactgcggcaagttcttggttgtgggcctcctcatatttggggccttcgcggtgggattaaaagcagcgaacctcgagaccaacgtggaggagctgtgggtggaagttggaggacgagtaagtcgtgaattaaattatactcgccagaagattggagaagaggctatgtttaatcctcaactcatgatacagacccctaaagaagaaggtgctaatgtcctgaccacagaagcgctcctacaacacctggactcggcactccaggccagccgtgtccatgtatacatgtacaacaggcagtggaaattggaacatttgtgttacaaatcaggagagcttatcacagaaacaggttacatggatcagataatagaatatctttacccttgtttgattattacacctttggactgcttctgggaaggggcgaaattacagtctgggacagcatacctcctaggtaaacctcctttgcggtggacaaacttcgaccctttggaattcctggaagagttaaagaaaataaactatcaagtggacagctgggaggaaatgctgaataaggctgaggttggtcatggttacatggaccgcccctgcctcaatccggccgatccagactgccccgccacagcccccaacaaaaattcaaccaaacctcttgatatggcccttgttttgaatggtggatgtcatggcttatccagaaagtatatgcactggcaggaggagttgattgtgggtggcacagtcaagaacagcactggaaaactcgtcagcgcccatgccctgcagaccatgttccagttaatgactcccaagcaaatgtacgagcacttcaaggggtacgagtatgtctcacacatcaactggaacgaggacaaagcggcagccatcctggaggcctggcagaggacatatgtggaggtggttcatcagagtgtcgcacagaactccactcaaaaggtgctttccttcaccaccacgaccctggacgacatcctgaaatccttctctgacgtcagtgtcatccgcgtggccagcggctacttactcatgctcgcctatgcctgtctaaccatgctgcgctgggactgctccaagtcccagggtgccgtggggctggctggcgtcctgctggttgcactgtcagtggctgcaggactgggcctgtgctcattgatcggaatttcctttaacgctgcaacaactcaggttttgccatttctcgctcttggtgttggtgtggatgatgtttttcttctggcccacgccttcagtgaaacaggacagaataaaagaatcccttttgaggacaggaccggggagtgcctgaagcgcacaggagccagcgtggccctcacgtccatcagcaatgtcacagccttcttcatggccgcgttaatcccaattcccgctctgcgggcgttctccctccaggcagcggtagtagtggtgttcaattttgccatggttctgctcatttttcctgcaattctcagcatggatttatatcgacgcgaggacaggagactggatattttctgctgttttacaagcccctgcgtcagcagagtgattcaggttgaacctcaggcctacaccgacacacacgacaatacccgctacagccccccacctccctacagcagccacagctttgcccatgaaacgcagattaccatgcagtccactgtccagctccgcacggagtacgacccccacacgcacgtgtactacaccaccgctgagccgcgctccgagatctctgtgcagcccgtcaccgtgacacaggacaccctcagctgccagagcccagagagcaccagctccacaagggacctgctctcccagttctccgactccagcctccactgcctcgagcccccctgtacgaagtggacactctcatcttttgctgagaagcactatgctcctttcctcttgaaaccaaaagccaaggtagtggtgatcttcctttttctgggcttgctgggggtcagcctttatggcaccacccgagtgagagacgggctggaccttacggacattgtacctcgggaaaccagagaatatgactttattgctgcacaattcaaatacttttctttctacaacatgtatatagtcacccagaaagcagactacccgaatatccagcacttactttacgacctacacaggagtttcagtaacgtgaagtatgtcatgttggaagaaaacaaacagcttcccaaaatgtggctgcactacttcagagactggcttcagggacttcaggatgcatttgacagtgactgggaaaccgggaaaatcatgccaaacaattacaagaatggatcagacgatggagtccttgcctacaaactcctggtgcaaaccggcagccgcgataagcccatcgacatcagccagttgactaaacagcgtctggtggatgcagatggcatcattaatcccagcgctttctacatctacctgacggcttgggtcagcaacgaccccgtcgcgtatgctgcctcccaggccaacatccggccacaccgaccagaatgggtccacgacaaagccgactacatgcctgaaacaaggctgagaatcccggcagcagagcccatcgagtatgcccagttccctttctacctcaacggcttgcgggacacctcagactttgtggaggcaattgaaaaagtaaggaccatctgcagcaactatacgagcctggggctgtccagttaccccaacggctaccccttcctcttctgggagcagtacatcggcctccgccactggctgctgctgttcatcagcgtggtgttggcctgcacattcctcgtgtgcgctgtcttccttctgaacccctggacggccgggatcattgtgatggtcctggcgctgatgacggtcgagctgttcggcatgatgggcctcatcggaatcaagctcagtgccgtgcccgtggtcatcctgatcgcttctgttggcataggagtggagttcaccgttcacgttgctttggcctttctgacggccatcggcgacaagaaccgcagggctgtgcttgccctggagcacatgtttgcacccgtcctggatggcgccgtgtccactctgctgggagtgctgatgctggcgggatctgagttcgacttcattgtcaggtatttctttgctgtgctggcgatcctcaccatcctcggcgttctcaatgggctggttttgcttcccgtgcttttgtctttctttggaccatatcctgaggtgtctccagccaacggcttgaaccgcctgcccacaccctcccctgagccaccccccagcgtggtccgcttcgccatgccgcccggccacacgcacagcgggtctgattcctccgactcggagtatagttcccagacgacagtgtcaggcctcagcgaggagcttcggcactacgaggcccagcagggcgcgggaggccctgcccaccaagtgatcgtggaagccacagaaaaccccgtcttcgcccactccactgtggtccatcccgaatccaggcatcacccaccctcgaacccgagacagcagccccacctggactcagggtccctgcctcccggacggcaaggccagcagccccgcagggacccccccagagaaggcttgtggccacccccctacagaccgcgcagagacgcttttgaaatttctactgaagggcattctggccctagcaatagggcccgctggggccctcgcggggcccgttctcacaaccctcggaacccagcgtccactgccatgggcagctccgtgcccggctactgccagcccatcaccactgtgacggcttctgcctccgtgactgtcgccgtgcacccgccgcctgtccctgggcctgggcggaacccccgagggggactctgcccaggctaccctgagactgaccacggcctgtttgaggacccccacgtgcctttccacgtccggtgtgagaggagggattcgaaggtggaagtcattgagctgcaggacgtggaatgcgaggagaggccccggggaagcagctccaactgagggtgattaaaatctgaagcaaagaggccaaagattggaaaccccccacccccacctctttccagaactgcttgaagagaactggttggagttatggaaaagatgccctgtgccaggacagcagttcattgttactgtaaccgattgtattattttgttaaatatttctataaatatttaagagatgtacacatgtgtaatataggaaggaaggatgtaaagtggtatgatctggggcttctccactcctgccccagagtgtggaggccacagtggggcctctccgtatttgtgcattgggctccgtgccacaaccaagcttcattagtcttaaatttcagcatatgttgctgctgcttaaatattgtataatttacttgtataattctatgcaaatattgcttatgtaataggattattttgtaaaggtttctgtttaaaatattttaaatttgcatatcacaaccctgtggtagtatgaaatgttactgttaactttcaaacacgctatgcgtgataatttttttgtttaatgagcagatatgaagaaagcacgttaatcctggtggcttctctaggtgtcgttgtgtgcggtcctcttgtttggctgtgcgtgtgaacacgtgtgtgagttcaccatgtactgtactgtgattttttttttgtcttgttttgtttctctacactgtctgtaacctgtagtaggctctgacctagtcaggctggaagcgtcaggatatcttttcttcgtgctggtgagggctggccctaaacatccacctaatcctttcaaatcagcccggcaaaagctagactctcctcgtgtctacggcatctcttatgatcattggctgccatccaggaccccaatttgtgcttcagggggataatctccttctctcggatcattgtgatggatgctggaacctcagggtatggagctcacatcagttcatcatggtgggtgttagagaattcggtgacatgcctagtgctgagccttggctgggccatgagagtctgtatactctaaaaagcatgcagcatggtgcccctcttctgaccaacacacacacgacccctcccccaacacccccaaattcaagagtggatgtggccctgtcacaggtagaaaaacctatttagttaattctttcttggcccacagtctcccagaaatgatgttttgagtccctatagtttaaactccctctcttaaatggagcagctggttgaggctttctagatctgtttgcatcttctttaaaactaagtggtgagcatgcattgtggtgtagaggcaggcattatgtaggataagagctccggggggattcttcatgcaccagtgtttagggtacgtgcttcctaagtaaatccaaacattgtctccatcctccccgtcattagtgctctttcaatgtgatgtgggaaagcaggaggatggacacaccccactgaaagatgtaggcaggggcaggtctctcaaccaggcatatttttaaaagttgcttctgtactggttctcttcttttgctctgaggtgtgggctccctcatctcgtaaccagagaccagcacatgtcagggaagcacccagtgtcggctccccatccaaatccacaccagcaccttgttacagacaagaagtcagaggaaagggcggggtccctgcagggctgaagcctaagctactgtgaggcgctcacgagtggcagctcctgttactcccttttaaattacctgggaaatcttaacagaaaggtaatgggcccccagaaatacccacagcatagtgacctcagaccctgatactcaccacaaaacttttaagatgctgattgggagccgcttgtggctgctgggtgtgtgtgtgtgtgtgtgcgtgcgtgcgtgtgtgtgtgtctctgctggggaccctggccacccccctgctgctgtcttggtgcctgtcacccacatggtctgccatcctaacacccagctctgctcagaaaacgtcctgcgtggaggagggatgatgcagaattctgaagtcgacttccctctggctcctggcgtgccctcgctcccttcctgagcccagctcgtgttgcgccggaggctgcgcggcccctgatttctgcatggtgtagaactttctccaatagtcacattggcaaagggagaactggggtgggcggggggtggggctggcagggaattagaatttctctctctcttttaatagttttattttgtctgtcctgtttgttcatttggatgttttaatttttaaaaaaaaaaaaactttgctgatatttataattttgtatcataagaatgttttcctctacagtatttgtcatgccagtttataacaaaaaaaaatgcagggattttatttctattggaaacattacagctatgttttacttttggacagaatttttatttgtatagagtgcttactaatgttaaatagttcagagtatataacatttacattaaggactcatggtaggttttagggtaaggagtttaaaggaaataaatattcaaactgggtctcattgccaattttggtggaaatgagtttgtgtcatttcaattacaaagataaaagtatgccatataatttatttatatgaagatttatttttgtagtgtacatagtagtcatcaagtcttttgacagaagtatatttttaaagaatttatatgtgatgaatccataatgtctggaactttgctgagacatgagtgggcacagttttcattgtaaattacagcaaggaaagaaaatgtttaacagtgttaagagagtcagagcagagtggatattcatgcgattatgaagtgtttattagttaccattggcgacctagcatgcttctcatttcaaaccttggaaggtgaaaatgtacaaactctctaaataattaatgttcaaacactgatagaaattctaacatgaataaaaaataatataacttgttggttatatctttgtttgtagaatgctttttttctttaaaatacttgggagagacagttagtgttggagccatcagaaactgttgtttcatcttgctgaccttgtgacactcttcttttttgctctatctgatggagagagttttaggttttcctcctttttgttttgtataaatagtgggtataagcatagctctgttacatggatgtattacaaagtgggggctgagcttttagtgtgatcatcacccaaatagtgtacattgtacccattaattaatttcttatcacctgaccctatttttgttttctcataccaagaaacttcctaagttaaccatcaaaattagtccttctgtcatctctcttagcatacttatttcccttatgtgatgcctaataatgagggaacataaataaagccaaattcaaagataaaaaaaaaaaaaa

SEQ ID NO: 182 - DNA, 5572 bp, Homo sapiens
  gene (1)..(5572): Accession No. NM_000314
cctcccctcgcccggcgcggtcccgtccgcctctcgctcgcctcccgcctcccctcggtcttccgaggcgcccgggctcccggcgcggcggcggagggggcgggcaggccggcgggcggtgatgtggcgggactctttatgcgctgcggcaggatacgcgctcggcgctgggacgcgactgcgctcagttctctcctctcggaagctgcagccatgatggaagtttgagagttgagccgctgtgaggcgaggccgggctcaggcgagggagatgagagacggcggcggccgcggcccggagcccctctcagcgcctgtgagcagccgcgggggcagcgccctcggggagccggccggcctgcggcggcggcagcggcggcgtttctcgcctcctcttcgtcttttctaaccgtgcagcctcttcctcggcttctcctgaaagggaaggtggaagccgtgggctcgggcgggagccggctgaggcgcggcggcggcggcggcacctcccgctcctggagcgggggggagaagcggcggcggcggcggccgcggcggctgcagctccagggagggggtctgagtcgcctgtcaccatttccagggctgggaacgccggagagttggtctctccccttctactgcctccaacacggcggcggcggcggcggcacatccagggacccgggccggttttaaacctcccgtccgccgccgccgcaccccccgtggcccgggctccggaggccgccggcggaggcagccgttcggaggattattcgtcttctccccattccgctgccgccgctgccaggcctctggctgctgaggagaagcaggcccagtcgctgcaaccatccagcagccgccgcagcagccattacccggctgcggtccagagccaagcggcggcagagcgaggggcatcagctaccgccaagtccagagccatttccatcctgcagaagaagccccgccaccagcagcttctgccatctctctcctcctttttcttcagccacaggctcccagacatgacagccatcatcaaagagatcgttagcagaaacaaaaggagatatcaagaggatggattcgacttagacttgacctatatttatccaaacattattgctatgggatttcctgcagaaagacttgaaggcgtatacaggaacaatattgatgatgtagtaaggtttttggattcaaagcataaaaaccattacaagatatacaatctttgtgctgaaagacattatgacaccgccaaatttaattgcagagttgcacaatatccttttgaagaccataacccaccacagctagaacttatcaaacccttttgtgaagatcttgaccaatggctaagtgaagatgacaatcatgttgcagcaattcactgtaaagctggaaagggacgaactggtgtaatgatatgtgcatatttattacatcggggcaaatttttaaaggcacaagaggccctagatttctatggggaagtaaggaccagagacaaaaagggagtaactattcccagtcagaggcgctatgtgtattattatagctacctgttaaagaatcatctggattatagaccagtggcactgttgtttcacaagatgatgtttgaaactattccaatgttcagtggcggaacttgcaatcctcagtttgtggtctgccagctaaaggtgaagatatattcctccaattcaggacccacacgacgggaagacaagttcatgtactttgagttccctcagccgttacctgtgtgtggtgatatcaaagtagagttcttccacaaacagaacaagatgctaaaaaaggacaaaatgtttcacttttgggtaaatacattcttcataccaggaccagaggaaacctcagaaaaagtagaaaatggaagtctatgtgatcaagaaatcgatagcatttgcagtatagagcgtgcagataatgacaaggaatatctagtacttactttaacaaaaaatgatcttgacaaagcaaataaagacaaagccaaccgatacttttctccaaattttaaggtgaagctgtacttcacaaaaacagtagaggagccgtcaaatccagaggctagcagttcaacttctgtaacaccagatgttagtgacaatgaacctgatcattatagatattctgacaccactgactctgatccagagaatgaaccttttgatgaagatcagcatacacaaattacaaaagtctgaatttttttttatcaagagggataaaacaccatgaaaataaacttgaataaactgaaaatggacctttttttttttaatggcaataggacattgtgtcagattaccagttataggaacaattctcttttcctgaccaatcttgttttaccctatacatccacagggttttgacacttgttgtccagttgaaaaaaggttgtgtagctgtgtcatgtatatacctttttgtgtcaaaaggacatttaaaattcaattaggattaataaagatggcactttcccgttttattccagttttataaaaagtggagacagactgatgtgtatacgtaggaattttttccttttgtgttctgtcaccaactgaagtggctaaagagctttgtgatatactggttcacatcctacccctttgcacttgtggcaacagataagtttgcagttggctaagagaggtttccgaagggttttgctacattctaatgcatgtattcgggttaggggaatggagggaatgctcagaaaggaaataattttatgctggactctggaccatataccatctccagctatttacacacacctttctttagcatgctacagttattaatctggacattcgaggaattggccgctgtcactgcttgttgtttgcgcatttttttttaaagcatattggtgctagaaaaggcagctaaaggaagtgaatctgtattggggtacaggaatgaaccttctgcaacatcttaagatccacaaatgaagggatataaaaataatgtcataggtaagaaacacagcaacaatgacttaaccatataaatgtggaggctatcaacaaagaatgggcttgaaacattataaaaattgacaatgatttattaaatatgttttctcaattgtaacgacttctccatctcctgtgtaatcaaggccagtgctaaaattcagatgctgttagtacctacatcagtcaacaacttacacttattttactagttttcaatcataatacctgctgtggatgcttcatgtgctgcctgcaagcttcttttttctcattaaatataaaatattttgtaatgctgcacagaaattttcaatttgagattctacagtaagcgttttttttctttgaagatttatgatgcacttattcaatagctgtcagccgttccacccttttgaccttacacattctattacaatgaattttgcagttttgcacattttttaaatgtcattaactgttagggaattttacttgaatactgaatacatataatgtttatattaaaaaggacatttgtgttaaaaaggaaattagagttgcagtaaactttcaatgctgcacacaaaaaaaagacatttgatttttcagtagaaattgtcctacatgtgctttattgatttgctattgaaagaatagggtttttttttttttttttttttttttttttaaatgtgcagtgttgaatcatttcttcatagtgctcccccgagttgggactagggcttcaatttcacttcttaaaaaaaatcatcatatatttgatatgcccagactgcatacgattttaagcggagtacaactactattgtaaagctaatgtgaagatattattaaaaaggtttttttttccagaaatttggtgtcttcaaattataccttcaccttgacatttgaatatccagccattttgtttcttaatggtataaaattccattttcaataacttattggtgctgaaattgttcactagctgtggtctgacctagttaatttacaaatacagattgaataggacctactagagcagcatttatagagtttgatggcaaatagattaggcagaacttcatctaaaatattcttagtaaataatgttgacacgttttccataccttgtcagtttcattcaacaatttttaaatttttaacaaagctcttaggatttacacatttatatttaaacattgatatatagagtattgattgattgctcataagttaaattggtaaagttagagacaactattctaacacctcaccattgaaatttatatgccaccttgtctttcataaaagctgaaaattgttacctaaaatgaaaatcaacttcatgttttgaagatagttataaatattgttctttgttacaatttcgggcaccgcatattaaaacgtaactttattgttccaatatgtaacatggagggccaggtcataaataatgacattataatgggcttttgcactgttattatttttcctttggaatgtgaaggtctgaatgagggttttgattttgaatgtttcaatgtttttgagaagccttgcttacattttatggtgtagtcattggaaatggaaaaatggcattatatatattatatatataaatatatattatacatactctccttactttatttcagttaccatccccatagaatttgacaagaattgctatgactgaaaggttttcgagtcctaattaaaactttatttatggcagtattcataattagcctgaaatgcattctgtaggtaatctctgagtttctggaatattttcttagactttttggatgtgcagcagcttacatgtctgaagttacttgaaggcatcacttttaagaaagcttacagttgggccctgtaccatcccaagtcctttgtagctcctcttgaacatgtttgccatacttttaaaagggtagttgaataaatagcatcaccattctttgctgtggcacaggttataaacttaagtggagtttaccggcagcatcaaatgtttcagctttaaaaaataaaagtagggtacaagtttaatgtttagttctagaaattttgtgcaatatgttcataacgatggctgtggttgccacaaagtgcctcgtttacctttaaatactgttaatgtgtcatgcatgcagatggaaggggtggaactgtgcactaaagtgggggctttaactgtagtatttggcagagttgccttctacctgccagttcaaaagttcaacctgttttcatatagaatatatatactaaaaaatttcagtctgttaaacagccttactctgattcagcctcttcagatactcttgtgctgtgcagcagtggctctgtgtgtaaatgctatgcactgaggatacacaaaaataccaatatgatgtgtacaggataatgcctcatcccaatcagatgtccatttgttattgtgtttgttaacaaccctttatctcttagtgttataaactccacttaaaactgattaaagtctcattcttgtcaaaaaaaaaaaaaaaaaaaaaaaaaaa

SEQ ID NO: 183 - DNA, 3291 bp, Homo sapiens
  gene (1)..(3291): Accession No. NM_002880
agaatcggagagccggtggcgtcgcaggtcgggaggacgagcaccgagtcgagggctcgctcgtctgggccgcccgagagtcttaatcgcgggcgcttgggccgccatcttagatggcgggagtaagaggaaaacgattgtgaggcgggaacggctttctgctgccttttttgggccccgaaaagggtcagctggccgggctttggggcgcgtgccctgaggcgcggagcgcgtttgctacgatgcgggggctgctcggggctccgtcccctgggctggggacgcgccgaatgtgaccgcctcccgctccctcacccgccgcggggaggaggagcgggcgagaagctgccgccgaacgacaggacgttggggcggcctggctccctcaggtttaagaattgtttaagctgcatcaatggagcacatacagggagcttggaagacgatcagcaatggttttggattcaaagatgccgtgtttgatggctccagctgcatctctcctacaatagttcagcagtttggctatcagcgccgggcatcagatgatggcaaactcacagatccttctaagacaagcaacactatccgtgttttcttgccgaacaagcaaagaacagtggtcaatgtgcgaaatggaatgagcttgcatgactgccttatgaaagcactcaaggtgaggggcctgcaaccagagtgctgtgcagtgttcagacttctccacgaacacaaaggtaaaaaagcacgcttagattggaatactgatgctgcgtctttgattggagaagaacttcaagtagatttcctggatcatgttcccctcacaacacacaactttgctcggaagacgttcctgaagcttgccttctgtgacatctgtcagaaattcctgctcaatggatttcgatgtcagacttgtggctacaaatttcatgagcactgtagcaccaaagtacctactatgtgtgtggactggagtaacatcagacaactcttattgtttccaaattccactattggtgatagtggagtcccagcactaccttctttgactatgcgtcgtatgcgagagtctgtttccaggatgcctgttagttctcagcacagatattctacacctcacgccttcacctttaacacctccagtccctcatctgaaggttccctctcccagaggcagaggtcgacatccacacctaatgtccacatggtcagcaccaccctgcctgtggacagcaggatgattgaggatgcaattcgaagtcacagcgaatcagcctcaccttcagccctgtccagtagccccaacaatctgagcccaacaggctggtcacagccgaaaacccccgtgccagcacaaagagagcgggcaccagtatctgggacccaggagaaaaacaaaattaggcctcgtggacagagagattcaagctattattgggaaatagaagccagtgaagtgatgctgtccactcggattgggtcaggctcttttggaactgtttataagggtaaatggcacggagatgttgcagtaaagatcctaaaggttgtcgacccaaccccagagcaattccaggccttcaggaatgaggtggctgttctgcgcaaaacacggcatgtgaacattctgcttttcatggggtacatgacaaaggacaacctggcaattgtgacccagtggtgcgagggcagcagcctctacaaacacctgcatgtccaggagaccaagtttcagatgttccagctaattgacattgcccggcagacggctcagggaatggactatttgcatgcaaagaacatcatccatagagacatgaaatccaacaatatatttctccatgaaggcttaacagtgaaaattggagattttggtttggcaacagtaaagtcacgctggagtggttctcagcaggttgaacaacctactggctctgtcctctggatggccccagaggtgatccgaatgcaggataacaacccattcagtttccagtcggatgtctactcctatggcatcgtattgtatgaactgatgacgggggagcttccttattctcacatcaacaaccgagatcagatcatcttcatggtgggccgaggatatgcctccccagatcttagtaagctatataagaactgccccaaagcaatgaagaggctggtagctgactgtgtgaagaaagtaaaggaagagaggcctctttttccccagatcctgtcttccattgagctgctccaacactctctaccgaagatcaaccggagcgcttccgagccatccttgcatcgggcagcccacactgaggatatcaatgcttgcacgctgaccacgtccccgaggctgcctgtcttctagttgactttgcacctgtcttcaggctgccaggggaggaggagaagccagcaggcaccacttttctgctccctttctccagaggcagaacacatgttttcagagaagctgctgctaaggaccttctagactgctcacagggccttaacttcatgttgccttcttttctatccctttgggccctgggagaaggaagccatttgcagtgctggtgtgtcctgctccctccccacattccccatgctcaaggcccagccttctgtagatgcgcaagtggatgttgatggtagtacaaaaagcaggggcccagccccagctgttggctacatgagtatttagaggaagtaaggtagcaggcagtccagccctgatgtggagacacatgggattttggaaatcagcttctggaggaatgcatgtcacaggcgggactttcttcagagagtggtgcagcgccagacattttgcacataaggcaccaaacagcccaggactgccgagactctggccgcccgaaggagcctgctttggtactatggaacttttcttaggggacacgtcctcctttcacagcttctaaggtgtccagtgcattgggatggttttccaggcaaggcactcggccaatccgcatctcagccctctcagggagcagtcttccatcatgctgaattttgtcttccaggagctgcccctatggggcggggccgcagggccagccttgtttctctaacaaacaaacaaacaaacagccttgtttctctagtcacatcatgtgtatacaaggaagccaggaatacaggttttcttgatgatttgggttttaattttgtttttattgcacctgacaaaatacagttatctgatggtccctcaattatgttattttaataaaataaattaaatttaggtgtaaaaaaaaaaaaaaaaaa

SEQ ID NO: 184 - DNA, 4772 bp, Homo sapiens
  gene (1)..(4772): Accession No. NM_000321
gctcagttgccgggcgggggagggcgcgtccggtttttctcaggggacgttgaaattatttttgtaacgggagtcgggagaggacggggcgtgccccgacgtgcgcgcgcgtcgtcctccccggcgctcctccacagctcgctggctcccgccgcggaaaggcgtcatgccgcccaaaaccccccgaaaaacggccgccaccgccgccgctgccgccgcggaacccccggcaccgccgccgccgccccctcctgaggaggacccagagcaggacagcggcccggaggacctgcctctcgtcaggcttgagtttgaagaaacagaagaacctgattttactgcattatgtcagaaattaaagataccagatcatgtcagagagagagcttggttaacttgggagaaagtttcatctgtggatggagtattgggaggttatattcaaaagaaaaaggaactgtggggaatctgtatctttattgcagcagttgacctagatgagatgtcgttcacttttactgagctacagaaaaacatagaaatcagtgtccataaattctttaacttactaaaagaaattgataccagtaccaaagttgataatgctatgtcaagactgttgaagaagtatgatgtattgtttgcactcttcagcaaattggaaaggacatgtgaacttatatatttgacacaacccagcagttcgatatctactgaaataaattctgcattggtgctaaaagtttcttggatcacatttttattagctaaaggggaagtattacaaatggaagatgatctggtgatttcatttcagttaatgctatgtgtccttgactattttattaaactctcacctcccatgttgctcaaagaaccatataaaacagctgttatacccattaatggttcacctcgaacacccaggcgaggtcagaacaggagtgcacggatagcaaaacaactagaaaatgatacaagaattattgaagttctctgtaaagaacatgaatgtaatatagatgaggtgaaaaatgtttatttcaaaaattttataccttttatgaattctcttggacttgtaacatctaatggacttccagaggttgaaaatctttctaaacgatacgaagaaatttatcttaaaaataaagatctagatgcaagattatttttggatcatgataaaactcttcagactgattctatagacagttttgaaacacagagaacaccacgaaaaagtaaccttgatgaagaggtgaatgtaattcctccacacactccagttaggactgttatgaacactatccaacaattaatgatgattttaaattcagcaagtgatcaaccttcagaaaatctgatttcctattttaacaactgcacagtgaatccaaaagaaagtatactgaaaagagtgaaggatataggatacatctttaaagagaaatttgctaaagctgtgggacagggttgtgtcgaaattggatcacagcgatacaaacttggagttcgcttgtattaccgagtaatggaatccatgcttaaatcagaagaagaacgattatccattcaaaattttagcaaacttctgaatgacaacatttttcatatgtctttattggcgtgcgctcttgaggttgtaatggccacatatagcagaagtacatctcagaatcttgattctggaacagatttgtctttcccatggattctgaatgtgcttaatttaaaagcctttgatttttacaaagtgatcgaaagttttatcaaagcagaaggcaacttgacaagagaaatgataaaacatttagaacgatgtgaacatcgaatcatggaatcccttgcatggctctcagattcacctttatttgatcttattaaacaatcaaaggaccgagaaggaccaactgatcaccttgaatctgcttgtcctcttaatcttcctctccagaataatcacactgcagcagatatgtatctttctcctgtaagatctccaaagaaaaaaggttcaactacgcgtgtaaattctactgcaaatgcagagacacaagcaacctcagccttccagacccagaagccattgaaatctacctctctttcactgttttataaaaaagtgtatcggctagcctatctccggctaaatacactttgtgaacgccttctgtctgagcacccagaattagaacatatcatctggacccttttccagcacaccctgcagaatgagtatgaactcatgagagacaggcatttggaccaaattatgatgtgttccatgtatggcatatgcaaagtgaagaatatagaccttaaattcaaaatcattgtaacagcatacaaggatcttcctcatgctgttcaggagacattcaaacgtgttttgatcaaagaagaggagtatgattctattatagtattctataactcggtcttcatgcagagactgaaaacaaatattttgcagtatgcttccaccaggccccctaccttgtcaccaatacctcacattcctcgaagcccttacaagtttcctagttcacccttacggattcctggagggaacatctatatttcacccctgaagagtccatataaaatttcagaaggtctgccaacaccaacaaaaatgactccaagatcaagaatcttagtatcaattggtgaatcattcgggacttctgagaagttccagaaaataaatcagatggtatgtaacagcgaccgtgtgctcaaaagaagtgctgaaggaagcaaccctcctaaaccactgaaaaaactacgctttgatattgaaggatcagatgaagcagatggaagtaaacatctcccaggagagtccaaatttcagcagaaactggcagaaatgacttctactcgaacacgaatgcaaaagcagaaaatgaatgatagcatggatacctcaaacaaggaagagaaatgaggatctcaggaccttggtggacactgtgtacacctctggattcattgtctctcacagatgtgactgtataactttcccaggttctgtttatggccacatttaatatcttcagctctttttgtggatataaaatgtgcagatgcaattgtttgggtgattcctaagccacttgaaatgttagtcattgttatttatacaagattgaaaatcttgtgtaaatcctgccatttaaaaagttgtagcagattgtttcctcttccaaagtaaaattgctgtgctttatggatagtaagaatggccctagagtgggagtcctgataacccaggcctgtctgactactttgccttcttttgtagcatataggtgatgtttgctcttgtttttattaatttatatgtatatttttttaatttaacatgaacacccttagaaaatgtgtcctatctatcttccaaatgcaatttgattgactgcccattcaccaaaattatcctgaactcttctgcaaaaatggatattattagaaattagaaaaaaattactaattttacacattagattttattttactattggaatctgatatactgtgtgcttgttttataaaattttgcttttaattaaataaaagctggaagcaaagtataaccatatgatactatcatactactgaaacagatttcatacctcagaatgtaaaagaacttactgattattttcttcatccaacttatgtttttaaatgaggattattgatagtactcttggtttttataccattcagatcactgaatttataaagtacccatctagtacttgaaaaagtaaagtgttctgccagatcttaggtatagaggaccctaacacagtatatcccaagtgcactttctaatgtttctgggtcctgaagaattaagatacaaattaattttactccataaacagactgttaattataggagccttaatttttttttcatagagatttgtctaattgcatctcaaaattattctgccctccttaatttgggaaggtttgtgttttctctggaatggtacatgtcttccatgtatcttttgaactggcaattgtctatttatcttttatttttttaagtcagtatggtctaacactggcatgttcaaagccacattatttctagtccaaaattacaagtaatcaagggtcattatgggttaggcattaatgtttctatctgattttgtgcaaaagcttcaaattaaaacagctgcattagaaaaagaggcgcttctcccctcccctacacctaaaggtgtatttaaactatcttgtgtgattaacttatttagagatgctgtaacttaaaataggggatatttaaggtagcttcagctagcttttaggaaaatcactttgtctaactcagaattatttttaaaaagaaatctggtcttgttagaaaacaaaattttattttgtgctcatttaagtttcaaacttactattttgacagttattttgataacaatgacactagaaaacttgactccatttcatcattgtttctgcatgaatatcatacaaatcagttagtttttaggtcaagggcttactatttctgggtcttttgctactaagttcacattagaattagtgccagaattttaggaacttcagagatcgtgtattgagatttcttaaataatgcttcagatattattgctttattgcttttttgtattggttaaaactgtacatttaaaattgctatgttactattttctacaattaatagtttgtctattttaaaataaattagttgttaagagtcttaa

SEQ ID NO: 185 - DNA, 1926 bp, Homo sapiens
  gene (1)..(1926): Accession No. NM_001664
gtggatgagctgtgagtgcgcgcgcgtgcgcggggccgcgacctgtgccggctcgagcccgctgggcactcggaggcgcgcacgtcgttccccgccctcccgccgccgcccgccctcgctctctcgcgctaccctcccgccgcccgcggtcctccgtcggttctctcgttagtccacggtctggtcttcagctacccgccttcgtctccgagtttgcgactcgcggaccggcgtccccggcgcgaagaggctggactcggattcgttgcctgagcaatggctgccatccggaagaaactggtgattgttggtgatggagcctgtggaaagacatgcttgctcatagtcttcagcaaggaccagttcccagaggtgtatgtgcccacagtgtttgagaactatgtggcagatatcgaggtggatggaaagcaggtagagttggctttgtgggacacagctgggcaggaagattatgatcgcctgaggcccctctcctacccagataccgatgttatactgatgtgtttttccatcgacagccctgatagtttagaaaacatcccagaaaagtggaccccagaagtcaagcatttctgtcccaacgtgcccatcatcctggttgggaataagaaggatcttcggaatgatgagcacacaaggcgggagctagccaagatgaagcaggagccggtgaaacctgaagaaggcagagatatggcaaacaggattggcgcttttgggtacatggagtgttcagcaaagaccaaagatggagtgagagaggtttttgaaatggctacgagagctgctctgcaagctagacgtgggaagaaaaaatctgggtgccttgtcttgtgaaaccttgctgcaagcacagcccttatgcggttaattttgaagtgctgtttattaatcttagtgtatgattactggcctttttcatttatctataatttacctaagattacaaatcagaagtcatcttgctaccagtatttagaagccaactatgattattaacgatgtccaacccgtctggcccaccagggtccttttgacactgctctaacagccctcctctgcactcccacctgacacaccaggcgctaattcaaggaatttcttaacttcttgcttctttctagaaagagaaacagttggtaacttttgtgaattaggctgtaactactttataactaacatgtcctgcctattatctgtcagctgcaaggtactctggtgagtcaccacttcagggctttactccgtaacagattttgttggcatagctctggggtgggcagttttttgaaaatgggctcaaccagaaaagcccaagttcatgcagctgtggcagagttacagttctgtggtttcatgttagttaccttatagttactgtgtaattagtgccacttaatgtatgttaccaaaaataaatatatctaccccagactagatgtagtattttttgtataattggatttcctaatactgtcatcctcaaagaaagtgtattggttttttaaaaaagaaagtgtatttggaaataaagtcagatggaaaattcattttttaaattcccgttttgtcactttttctgataaaagatggccatattaccccttttcggccccatgtatctcagtaccccatggagctgggctaagtaaataggaattggtttcacgcctgaggcaattagacactttggaagatggcataacctgtctcacctggacttaagcatctggctctaattcacagtgctcttttctcctcactgtatccaggttccctcccagaggagccaccagttctcatgggtggcactcagtctctcttctctccagctgactaaactttttttctgtaccagttaatttttccaactactaatagaataaaggcagttttctaaaaaaa

SEQ ID NO: 186 - DNA, 1415 bp, Homo sapiens
  gene (1)..(1415): Accession No. NM_175744
attgaaggctgggcagagtctgagtccacccgggtcgtgctccccccgctcgcccggctcctccgcagtccaggaatctccccgtggctctccccgacctggaggggtggacgcccctggcccccagtccccggcctgcggagggggccggtggctgcggccctgcgcggggccggggcgggccgagccaagggccgcccccggccgaccctccccctgccgggcccgccctccccgccgcggcgctggaggagggcggggcggggccctggggtcagtctgagcctccggcaccggccgcgcagctggaggcggcggagcggaagccttgacttcatctcagctccagagcccgccctctcttcctgcagcctgggaacttcagccggctggagccccaccatggctgcaatccgaaagaagctggtgatcgttggggatggtgcctgtgggaagacctgcctcctcatcgtcttcagcaaggatcagtttccggaggtctacgtccctactgtctttgagaactatattgcggacattgaggtggacggcaagcaggtggagctggctctgtgggacacagcagggcaggaagactatgatcgactgcggcctctctcctacccggacactgatgtcatcctcatgtgcttctccatcgacagccctgacagcctggaaaacattcctgagaagtggaccccagaggtgaagcacttctgccccaacgtgcccatcatcctggtggggaataagaaggacctgaggcaagacgagcacaccaggagagagctggccaagatgaagcaggagcccgttcggtctgaggaaggccgggacatggcgaaccggatcagtgcctttggctaccttgagtgctcagccaagaccaaggagggagtgcgggaggtgtttgagatggccactcgggctggcctccaggtccgcaagaacaagcgtcggaggggctgtcccattctctgagatccccaaggcctttcctacatgccccctcccttcacaggggtacagaaattatccccctacaaccccagcctcctgagggctccatgctgaaggctcccattttcagttccctcctgcccaggactgcattgttttctagccccgaggtggtggcacgggccctccctcccagcgctctgggagccacgcctatgccctgcccttcctcagggcccctggggatcttgccccctttgaccttccccaaaggatggtcacacaccagcactttatacacttctggctcacaggaaagtgtctgcagtaggggacccagagtcccaggcccctggagttgttttcggcaggggccttgtctctcactgcatttggtcaggggggcatgaataaaggctacaggctccaacgtgaaaaaaaaaaaaaaaaaa

SEQ ID NO: 187 - DNA, 4642 bp, Homo sapiens
  gene (1)..(4642): Accession No. NM_006378
gctgtaacactcaccgtgaaggtctgcagcttcactcccgagccagcgagaccacgaacccaccagaaggaagaaactctgaacacatctgaacatcagaagggacagactccagacgcgccaccactctgctaacaccagatagtggaaagaaaccatgtgctgaaatgtttgacgacactgatggtttgactctgctaactggaatggcttattgtgcaagaaagtacacctggtcgggtcctggggctcatctctagcaccagcaaagatttctgaagacgtctttctagaaatgactggaaagtttcaagaggcataagatacagcatttcttctgaggccctgaagaagtatcaagtgggctttgacattgcggtggtgagagcgacccctcctcacctggagaactgggaaatgtggattctcagggaccgcgctgttcacgagctccaggctgtgctgctggccctggtcctggggcgctgagccgcatctgcaatagcacacttgcccggccacctgctgccgtgagcctttgctgctgaagcccctggggtcgcctctacctgatgaggatgtgcacccccattagggggctgctcatggcccttgcagtgatgtttgggacagcgatggcatttgcacccataccccggatcacctgggagcacagagaggtgcacctggtgcagtttcatgagccagacatctacaactactcagccttgctgctgagcgaggacaaggacaccttgtacataggtgcccgggaggcggtcttcgctgtgaacgcactcaacatctccgagaagcagcatgaggtgtattggaaggtctcagaagacaaaaaagcaaaatgtgcagaaaaggggaaatcaaaacagacagagtgcctcaactacatccgggtgctgcagccactcagcgccacttccctttacgtgtgtgggaccaacgcattccagccggcctgtgaccacctgaacttaacatcctttaagtttctggggaaaaatgaagatggcaaaggaagatgtccctttgacccagcacacagctacacatccgtcatggttgatggagaactttattcggggacgtcgtataattttttgggaagtgaacccatcatctcccgaaattcttcccacagtcctctgaggacagaatatgcaatcccttggctgaacgagcctagtttcgtgtttgctgacgtgatccgaaaaagcccagacagccccgacggcgaggatgacagggtctacttcttcttcacggaggtgtctgtggagtatgagtttgtgttcagggtgctgatcccacggatagcaagagtgtgcaagggggaccagggcggcctgaggaccttgcagaagaaatggacctccttcctgaaagcccgactcatctgctcccggccagacagcggcttggtcttcaatgtgctgcgggatgtcttcgtgctcaggtccccgggcctgaaggtgcctgtgttctatgcactcttcaccccacagctgaacaacgtggggctgtcggcagtgtgcgcctacaacctgtccacagccgaggaggtcttctcccacgggaagtacatgcagagcaccacagtggagcagtcccacaccaagtgggtgcgctataatggcccggtacccaagccgcggcctggagcgtgcatcgacagcgaggcacgggccgccaactacaccagctccttgaatttgccagacaagacgctgcagttcgttaaagaccaccctttgatggatgactcggtaaccccaatagacaacaggcccaggttaatcaagaaagatgtgaactacacccagatcgtggtggaccggacccaggccctggatgggactgtctatgatgtcatgtttgtcagcacagaccggggagctctgcacaaagccatcagcctcgagcacgctgttcacatcatcgaggagacccagctcttccaggactttgagccagtccagaccctgctgctgtcttcaaagaagggcaacaggtttgtctatgctggctctaactcgggcgtggtccaggccccgctggccttctgtgggaagcacggcacctgcgaggactgtgtgctggcgcgggacccctactgcgcctggagcccgcccacagcgacctgcgtggctctgcaccagaccgagagccccagcaggggtttgattcaggagatgagcggcgatgcttctgtgtgcccggataaaagtaaaggaagttaccggcagcattttttcaagcacggtggcacagcggaactgaaatgctcccaaaaatccaacctggcccgggtcttttggaagttccagaatggcgtgttgaaggccgagagccccaagtacggtcttatgggcagaaaaaacttgctcatcttcaacttgtcagaaggagacagtggggtgtaccagtgcctgtcagaggagagggttaagaacaaaacggtcttccaagtggtcgccaagcacgtcctggaagtgaaggtggttccaaagcccgtagtggcccccaccttgtcagttgttcagacagaaggtagtaggattgccaccaaagtgttggtggcatccacccaagggtcttctcccccaaccccagccgtgcaggccacctcctccggggccatcacccttcctcccaagcctgcgcccaccggcacatcctgcgaaccaaagatcgtcatcaacacggtcccccagctccactcggagaaaaccatgtatcttaagtccagcgacaaccgcctcctcatgtccctcttcctcttcttctttgttctcttcctctgcctctttttctacaactgctataagggatacctgcccagacagtgcttgaaattccgctcggccctactaattgggaagaagaagcccaagtcagatttctgtgaccgtgagcagagcctgaaggagacgttagtagagccagggagcttctcccagcagaatggggagcaccccaagccagccctggacaccggctatgagaccgagcaagacaccatcaccagcaaagtccccacggatagggaggactcacagaggatcgacgacctttctgccagggacaagccctttgacgtcaagtgtgagctgaagttcgctgactcagacgcagatggagactgaggccggctgtgcatccccgctggtgcctcggctgcgacgtgtccaggcgtggagagttttgtgtttctcctgttcagtatccgagtctcgtgcagtgctgcgtaggttagcccgcatcgtgcagacaacctcagtcctcttgtctattttctcttgggttgagcctgtgacttggtttctctttgtccttttggaaaaatgacaagcattgcatcccagtcttgtgttccgaagtcagtcggagtacttgaagaaggcccacgggcggcacggagttcctgagccctttctgtagtgggggaaaggtggctggacctctgttggctgagaagagcatcccttcagcttcccctccccgtagcagccactaaaagattatttaattccagattggaaatgacattttagtttatcagattggtaacttatcgcctgttgtccagattggcacgaaccttttcttccacttaattatttttttaggattttgctttgattgtgtttatgtcatgggtcatttttttttagttacagaagcagttgtgttaatatttagaagaagatgtatatcttccagattttgttatatatttggcataaaatacggcttacgttgcttaagattctcagggataaacttccttttgctaaatgcattctttctgcttttagaaatgtagacataaacactccccggagcccactcaccttttttctttttctttttttttttttaactttattccttgagggaagcattgtttttggagagattttctttctgtacttcgttttacttttctttttttttaacttttactctctcgaagaagaggaccttcccacatccacgaggtgggttttgagcaagggaaggtagcctggatgagctgagtggagccaggctggcccagagctgagatgggagtgcggtacaatctggagcccacagctgtcggtcagaacctcctgtgagacagatggaaccttcacaagggcgcctttggttctctgaacatctcctttctcttcttgcttcaattgcttacccactgcctgcccagactttctatccagcctcactgagctgcccactactggaagggaactgggcctcggtggccggggccgcgagctgtgaccacagcaccctcaagcatacggcgctgttcctgccactgtcctgaagatgtgaatgggtggtacgatttcaacactggttaatttcacactccatctccccgctttgtaaatacccatcgggaagagactttttttccatggtgaagagcaataaactctggatgtttgtgcgcgtgtgtggacagtcttatcttccagcatgataggatttgaccattttggtgtaaacatttgtgttttataagatttaccttgtttttatttttctactttgaattgtatacatttggaaagtacccaaataaatgagaagcttctatccttaaaaaaaaaaaaaa

SEQ ID NO: 188 - DNA, 5707 bp, Homo sapiens
  gene (1)..(5707): Accession No. NM_003036
cggggcggcggcgggggccgggggggcccgggcgcgcgggagcgggagcggccgggggagccggagcgcaccatggaggcggcggcaggcggccgcggctgtttccagccgcacccggggctgcagaagacgctggagcagttccacctgagctccatgagctcgctgggcggcccggccgctttctcggcgcgctgggcgcaggaggcctacaagaaggagagcgccaaggaggcgggcgcggccgcggtgccggcgccggtgcccgcagccaccgagccgccgcccgtgctgcacctgcccgccatccagccgccgccgcccgtgctgcccgggcccttcttcatgccgtccgaccgctccaccgagcgctgcgagaccgtactggaaggcgagaccatctcgtgcttcgtggtgggaggcgagaagcgcctgtgtctgccgcagattctcaactcggtgctgcgcgacttctcgctgcagcagatcaacgcggtgtgcgacgagctccacatctactgctcgcgctgcacggccgaccagctggagatcctcaaagtcatgggcatcctgcccttctcggcgccctcgtgcgggctcatcaccaagacggacgccgagcgcctgtgcaacgcgctgctctacggcggcgcctacccgccgccctgcaagaaggagctggccgccagcctggcgctgggcctggagctcagcgagcgcagcgtccgcgtgtaccacgagtgcttcggcaagtgtaaggggctgctggtgcccgagctctacagcagcccgagcgccgcctgcatccagtgcctggactgccgcctcatgtacccgccgcacaagttcgtggtgcactcgcacaaggccctggagaaccggacctgccactggggcttcgactcggccaactggcgggcctacatcctgctgagccaggattacacgggcaaggaggagcaggcgcgcctcggccgctgcctggacgacgtgaaggagaaattcgactatggcaacaagtacaagcggcgggtgccccgggtctcctctgagcctccggcctccataagacccaaaacagatgacacctcttcccagtcccccgcgccttccgaaaaggacaagccgtccagctggctgcggaccttggccggctcttccaataagagcctgggctgtgttcaccctcgccagcgcctctctgctttccgaccctggtcccccgcagtgtcagcgagtgagaaagagctctccccacacctcccggccctcatccgagacagcttctactcctacaagagctttgagacagccgtggcgcccaacgtggccctcgcaccgccggcccagcagaaggttgtgagcagccctccgtgtgccgccgccgtctcccgggcccccgagcctctcgccacttgcacccagcctcggaagcggaagctgactgtggacaccccaggagccccagagacgctggcgcccgtggctgccccagaggaggacaaggactcggaggcggaggtggaagttgaaagcagggaggaattcacctcctccttgtcctcgctctcttccccgtcctttacctcatccagctccgccaaggacctgggctccccgggtgcgcgtgccctgccctcggccgtccctgatgctgcggcccctgccgacgcccccagtgggctggaggcggagctggagcacctgcggcaggcactggagggcggcctggacaccaaggaagccaaagagaagttcctgcatgaggtggtcaagatgcgcgtgaagcaggaggagaagctcagcgcagccctgcaggccaagcgcagcctccaccaggagctggagttcctacgcgtggccaagaaggagaagctgcgggaggccacggaggccaagcgtaacctgcggaaggagatcgagcgtctccgcgccgagaacgagaagaagatgaaagaggccaacgagtcacggctgcgcctgaagcgggagctggagcaggcgcggcaggcccgggtgtgcgacaagggctgcgaggcgggccgcctgcgcgccaagtactcggcccagatcgaagacctgcaggtgaagctgcagcacgcggaggcggaccgggagcagctgcgggccgacctgctgcgggagcgcgaggcccgggagcacctggagaaggtggtgaaggagctgcaggaacagctgtggccgcgggcccgccccgaggctgcgggcagcgagggcgctgcggagctggagccgtagattccgtgcctgccgccgcagcgccgccgacaacgcgggtgcaggggggcgcggctgggcggtgcagctccgcccggctccgcccctgcagcccacacagcacaacgtcttaccgtgcctattaccaagcgagtgtttgtaaccatgtagttttggaacccactgcaaaattttctactggccaagttcaagtgagtaagccgcgtcccccaactacagctggagacggggccagctcggcggcctgctggtcctctgcttgctggaacattctaacatttacacttttgttataagctatttaaaaccagtaaggagacttgaaattcagaaaatcaacacatttttaaatgactaacttctaaaagccccaacacatgacgccatctgaagacccgcaacggagtgggggtggcggccgccccaccctccccacccggggaagccatcacagctcatctgcccgcggctgcgtgaggacagcaggggtttttcttcagagtctattttttcagcgacaaggacccaggtcttcctgctgctgccagggagagcagggacagtgccgcgtgcgagatgagctcgaacactgcccgccttactgccgcctaccccgcccgccacgccgccgtcgatgccagcgctgtccccacgggtaccaggaagtgcagagccgcacaggagctgccccggagctgaggggacggtcttcggctcctctgcaccccgtgattctgcccacgctcctccaccacgaggcactgacctgcgtcgggtggtgaccgtggctggcggtcacgccctcagcccctccgggcacacgtgccgcctgaccgggcgacccttttcagttcggcaaacgtcgctcccttcattttgggactgaggctgcagcattggaacaaaagagcattatttcaatttttctttctttttttttgttcgttcatttaaacgtatatttagaactgcactttgtccacaaccttcccttctctttctattccccagtgaactgaggtttttaccgatttatagagcagtcaaatccgaagtgctcgagtgcttagaaaccccctctggtgcttggttgaacaagggaatcacaagaaaacgaaaatgcaaaaactgaacttcgggggtcgttctgtgccttccagcatcttgtacagcaaatcctgactcgtgtctttttacccccaagatatctgtcttcagtagcgactgaatctgccactctcagaataagttccttgcatttattccaaataatctcgtttactctcacctgtttatgcaaattgtataaggtttcttatgcccaagcttgaaaaatgatttcccagtagacaagaggcggctacctatcctacagttacggtatttatttacataagaagatcttacaggagttctttgcttgaatccgttctaacacccgcggcagctgcacgcgctcacagaaggtggaggttacttgcccaggtacagacgacctcggggcagtgacgagcaaagaccagagactgctgagccctcgcatctgggtggcggaattgcctgcggggttttgcccttggtttactgaggggggtcttggttgctgctgaagccccccaccccttctaaagtgcaatgcaaaagggacatcatgtatatgcagcgtttgtttggaattttctttgcttttgttttctttgcggttgttctgtgtgcatggattccacacctctgccgtaggtagatccgtcagcgggcattattaccgtgtcttgtaaagggtcggttttgttatgcaacatgcagaatgctgtttttagccttgttttaccagagttgttttttttttcagttatttcttcaagggaaactaaatgatttagttggagcaaagctttaagtgtgttggcgtgcttctgtgtggctgtcctgtgtcgccaggtcgaagatcacagtgaggtagaggccctgccccatccccagggccgccaggcttgctccgtttgctttgagtttttagaccccagagggagatgagcttttccaagctgtgtctgggccagagcctctccttgcccttgctccatcccgacggtcaccgttgggtccacgcctccaccgccccatcttgccccaaacggaaagcgctgtatctgcagtggcagcccttccccacttcggctctgggagggtccagccagtgtcacctgggcccaccctttcctgcagctgccaggcccgtgcggtcagtgggacccggacgtgggcaggcgagctcgggaccctcccaggcagttcccacagctcttgcctcggctcaccagggtcacttccactgtcaggggcctgagggggcagctgtggctgcagggctgctctggactgaggggtcccaggccccgaggggtgcacgcctggctccccttggcacaggtgcgagtccgtttcttttcagcagaagggggaagaggtgtccgctgtgtgggctgctgactcctctgtgtgtgaggcccttcatctaagtgattgtgtattcagtttaattctcattatatttctatactgaaagaagatttttaacgaagggaaaaacaacagcaataacattcatatctctggagcagctaactcatacacgtaatgtctgcttttcgtacagaactagccaatgtaaaaacagttcacctgtaaatactttttcctttttcaccgttgtattatacatgtatatgctgggtcctttttcagaaactcttttcttacctgagagttgtcttgttttctgggctgtttttaactgaggaaaaaaaaaatgctttcctgccggggggcaggggagacggagaaacccatgtgcgtttcccatgtgaccccctcctccctgtgggtctgagccccggccccccccacctcctcctccctgtgggtccgaaccccggcccccccaccccctcctccctgtgggtccgaaccccggcccccccaccccctcctccctgtgggtccgatccccggccccccccaccccctcctccctgtgggtccgaaccccggccccccccccaccccctcctccctgtgggtccgaaccccggcccccccacccctccctcagcccaccagggtccagggagatgttcgttctcgctttaagtcaggagtcacaaatgacttttttttttcaattaaggaaaaagctccatctctacctttaacatcacccagacccccgcccctgcccgtgccccacgctgctgctaacgacagtatgatgcttactctgctactcggaaactatttttatgtaattaatgtatgctttcttgtttataaatgcctgatttaaaaagaaaagagcttggcatatttatctatttcgctgtgtacctgttagtccttccccgaccccgaaacagatgacattgtacaataaaggactttgagagga

SEQ ID NO: 189 - DNA, 3526 bp, Homo sapiens
  gene (1)..(3526): Accession No. NM_005414
gatgtgtgtggggttcggagccgcgccggcacagccgaagggagcgggcgagcggcgacggcggcggcggcgggcacagattaattaaaagaagaatgaactataatccttgaagataactgggcaattttttaagtcggaggctgttcttactggtgtgaggatttacacacgtcttcagtttttcagcacagaccagcagaccatcatttttagaggaaatactccctctgccctcctttttggtttccttggtggtaaagattaaatttggttgcatcattttgacttgtgtttgagtctagattttatggcacaaggaatggcataaacttttcatgtgttttggttaaaacaaaccagaccattgcattgaccctggacatctttaattgagaaattggtaactttattttaatatgtatatctgaagaattcaagaaaacaaaggcatcctcagaggtgtgcctcttttctttattattagaggcaaaacgaacaattttataggatttgtagtgaaattataccagattataaggagaaccaaaactaagtcgcaaaatttattaatttaaggggctctcgctttgaaagtttgagagtaagttacgataggcatttgtatccattcattactttcctcttttcaaataagcaactaaatagaaatgctaatctcagacttaattatttaacagaagagtgtaccatggaaaacctccagacaaatttctccttggttcagggctcaactaaaaaactgaatgggatgggagatgatggcagccccccagcgaaaaaaatgataacggacattcatgcaaatggaaaaacgataaacaaggtgccaacagttaagaaggaacacttggatgactatggagaagcaccagtggaaactgatggagagcatgttaagcgaacctgtacttctgttcctgaaactttgcatttaaatcccagtttgaaacacacattggcacaattccatttaagtagtcagagctcgctgggtggaccagcagcattttctgctcggcattcccaagaaagcatgtcgcctactgtatttctgcctcttccatcacctcaggttcttcctggcccattgctcatcccttcagatagctccacagaactcactcagactgtgttggaaggggaatctatttcttgttttcaagttggaggagaaaagagactctgtttgccccaagtcttaaattctgttctccgagaatttacactccagcaaataaatacagtgtgtgatgaactgtacatatattgttcaaggtgtacttcagaccagcttcatatcttaaaggtactgggcatacttccattcaatgccccatcctgtgggctgattacattaactgatgcacaaagattatgtaatgctttattgcggccacgaacttttcctcaaaatggtagcgtacttcctgctaaaagctcattggcccagttaaaggaaactggcagtgcctttgaagtggagcatgaatgcctaggcaaatgtcagggtttatttgcaccccagttttatgttcagcctgatgctccgtgtattcaatgtctggagtgttgtggaatgtttgcaccccagacgtttgtgatgcattctcacagatcacctgacaaaagaacttgccactggggctttgaatcagctaaatggcattgctatcttcatgtgaaccaaaaatacttaggaacacctgaagaaaagaaactgaagataattttagaagaaatgaaggagaagtttagcatgagaagtggaaagagaaatcaatccaagacagatgcaccatcaggaatggaattacagtcatggtatcctgttataaagcaggaaggtgaccatgtttctcagacacattcatttttacaccccagctactacttatacatgtgtgataaagtggttgccccaaatgtgtcacttacttctgctgtatcccagtctaaagagctcacaaagacagaggcaagtaagtccatatcaagacagtcagagaaggctcacagtagtggtaaacttcaaaaaacagtgtcttatccagatgtctcacttgaggaacaggagaaaatggatttaaaaacaagtagagaattatgtagccgtttagatgcatcaatctcaaataattctacaagtaaaaggaaatctgagtctgccacttgcaacttagtcagagacataaacaaagtgggaattggccttgttgctgccgcttcatctccgcttcttgtgaaagatgtcatttgtgaggatgataagggaaaaatcatggaagaagtaatgagaacttatttaaaacaacaggaaaaactaaacttgattttgcaaaagaagcaacaacttcagatggaagtaaaaatgttgagtagttcaaaatctatgaaggaactcactgaagaacagcagaatttacagaaagagcttgaatctttgcagaatgaacatgctcaaagaatggaagaattttatgttgaacagaaagacttagagaaaaaattggagcagataatgaagcaaaaatgtacctgtgactcaaatttagaaaaagacaaagaggctgaatatgcaggacagttggcagaactgaggcagagattggaccatgctgaggccgataggcaagaactccaagatgaactcagacaggaacgggaagcaagacagaagttagagatgatgataaaagagctaaagctgcaaattctgaaatcatcaaagactgctaaagaatagaaactgttaaagagattcatctgtgtattactgacaaggttttttttgtttgttgcttgctttggtaattgaattctgaagaatttatctgcatgacgataactaggcattctatccatttgtagatcagagaaagtgaagagattatatattagtacttaaatttttacattttccaaatgaatgaaaatgtatgtttctttgtacttttttaaaaaaatcagcttagtaacaatactatatggtttcaactagtaggtaatctgcttatatttctaatgcaaacttaacaattgtgtactttttaaaagctgcaatatgtgttggaaaatagctgtggtcaattttgttatccatatttcagactcaattttagatacaatggtggctttatattttaagtatatagagctactcaaggagttgaatctccccttttctcattaacacaatttttctaagttgatatggtgtactcattaacatacaccaaatttacttttactttgttcagattgtggaatgaatttccaccagttctcttctttttaatgtgtaccctaggaggaattttactgaggttatagcataccccatgagcacagtggggaagaagaatgtgttgttatgtgctgctgctaaacagaagcagcagttgtaatttgtttttcagtttaaatgtggttatagttagatttttttttaagcagcaacttttcaaaaataaaatgtgataatttctgaaaaaaaaaaaaaaaa

SEQ ID NO: 190 - DNA, 8789 bp, Homo sapiens
  gene (1)..(8789): Accession No. NM_005359
atgctcagtggcttctcgacaagttggcagcaacaacacggccctggtcgtcgtcgccgctgcggtaacggagcggtttgggtggcggagcctgcgttcgcgccttcccgctctcctcgggaggcccttcctgctctcccctaggctccgcggccgcccagggggtgggagcgggtgaggggagccaggcgcccagcgagagaggccccccgccgcagggcggcccgggagctcgaggcggtccggcccgcgcgggcagcggcgcggcgctgaggaggggcggcctggccgggacgcctcggggcgggggccgaggagctctccgggccgccggggaaagctacgggcccggtgcgtccgcggaccagcagcgcgggagagcggactcccctcgccaccgcccgagcccaggttatcctgaatacatgtctaacaattttccttgcaacgttagctgttgtttttcactgtttccaaaggatcaaaattgcttcagaaattggagacatatttgatttaaaaggaaaaacttgaacaaatggacaatatgtctattacgaatacaccaacaagtaatgatgcctgtctgagcattgtgcatagtttgatgtgccatagacaaggtggagagagtgaaacatttgcaaaaagagcaattgaaagtttggtaaagaagctgaaggagaaaaaagatgaattggattctttaataacagctataactacaaatggagctcatcctagtaaatgtgttaccatacagagaacattggatgggaggcttcaggtggctggtcggaaaggatttcctcatgtgatctatgcccgtctctggaggtggcctgatcttcacaaaaatgaactaaaacatgttaaatattgtcagtatgcgtttgacttaaaatgtgatagtgtctgtgtgaatccatatcactacgaacgagttgtatcacctggaattgatctctcaggattaacactgcagagtaatgctccatcaagtatgatggtgaaggatgaatatgtgcatgactttgagggacagccatcgttgtccactgaaggacattcaattcaaaccatccagcatccaccaagtaatcgtgcatcgacagagacatacagcaccccagctctgttagccccatctgagtctaatgctaccagcactgccaactttcccaacattcctgtggcttccacaagtcagcctgccagtatactggggggcagccatagtgaaggactgttgcagatagcatcagggcctcagccaggacagcagcagaatggatttactggtcagccagctacttaccatcataacagcactaccacctggactggaagtaggactgcaccatacacacctaatttgcctcaccaccaaaacggccatcttcagcaccacccgcctatgccgccccatcccggacattactggcctgttcacaatgagcttgcattccagcctcccatttccaatcatcctgctcctgagtattggtgttccattgcttactttgaaatggatgttcaggtaggagagacatttaaggttccttcaagctgccctattgttactgttgatggatacgtggacccttctggaggagatcgcttttgtttgggtcaactctccaatgtccacaggacagaagccattgagagagcaaggttgcacataggcaaaggtgtgcagttggaatgtaaaggtgaaggtgatgtttgggtcaggtgccttagtgaccacgcggtctttgtacagagttactacttagacagagaagctgggcgtgcacctggagatgctgttcataagatctacccaagtgcatatataaaggtctttgatttgcgtcagtgtcatcgacagatgcagcagcaggcggctactgcacaagctgcagcagctgcccaggcagcagccgtggcaggaaacatccctggcccaggatcagtaggtggaatagctccagctatcagtctgtcagctgctgctggaattggtgttgatgaccttcgtcgcttatgcatactcaggatgagttttgtgaaaggctggggaccggattacccaagacagagcatcaaagaaacaccttgctggattgaaattcacttacaccgggccctccagctcctagacgaagtacttcataccatgccgattgcagacccacaacctttagactgaggtcttttaccgttggggcccttaaccttatcaggatggtggactacaaaatacaatcctgtttataatctgaagatatatttcacttttgttctgctttatcttttcataaagggttgaaaatgtgtttgctgccttgctcctagcagacagaaactggattaaaacaattttttttttcctcttcagaacttgtcaggcatggctcagagcttgaagattaggagaaacacattcttattaattcttcacctgttatgtatgaaggaatcattccagtgctagaaaatttagccctttaaaacgtcttagagccttttatctgcagaacatcgatatgtatatcattctacagaataatccagtattgctgattttaaaggcagagaagttctcaaagttaattcacctatgttattttgtgtacaagttgttattgttgaacatacttcaaaaataatgtgccatgtgggtgagttaattttaccaagagtaactttactctgtgtttaaaaagtaagttaataatgtattgtaatctttcatccaaaatattttttgcaagttatattagtgaagatggtttcaattcagattgtcttgcaacttcagttttatttttgccaaggcaaaaaactcttaatctgtgtgtatattgagaatcccttaaaattaccagacaaaaaaatttaaaattacgtttgttattcctagtggatgactgttgatgaagtatacttttcccctgttaaacagtagttgtattcttctgtatttctaggcacaaggttggttgctaagaagcctataagaggaatttcttttccttcattcatagggaaaggttttgtattttttaaaacactaaaagcagcgtcactctacctaatgtctcactgttctgcaaaggtggcaatgcttaaactaaataatgaataaactgaatattttggaaactgctaaattctatgttaaatactgtgcagaataatggaaacattacagttcataataggtagtttggatatttttgtacttgatttgatgtgactttttttggtataatgtttaaatcatgtatgttatgatattgtttaaaattcagtttttgtatcttggggcaagactgcaaacttttttatatcttttggttattctaagccctttgccatcaatgatcatatcaattggcagtgactttgtatagagaatttaagtagaaaagttgcagatgtattgactgtaccacagacacaatatgtatgctttttacctagctggtagcataaataaaactgaatctcaacatacaaagttgaattctaggtttgatttttaagattttttttttcttttgcacttttgagtccaatctcagtgatgaggtaccttctactaaatgacaggcaacagccagttctattgggcagctttgtttttttccctcacactctaccgggacttccccatggacattgtgtatcatgtgtagagttggttttttttttttttaatttttattttactatagcagaaatagacctgattatctacaagatgataaatagattgtctacaggataaatagtatgaaataaaatcaaggattatctttcagatgtgtttacttttgcctggagaacttttagctatagaaacacttgtgtgatgatagtcctccttatatcacctggaatgaacacagcttctactgccttgctcagaaggtcttttaaatagaccatcctagaaaccactgagtttgcttatttctgtgatttaaacatagatcttgatccaagctacatgacttttgtctttaaataacttatctaccacctcatttgtactcttgattacttacaaattctttcagtaaacacctaattttcttctgtaaaagtttggtgatttaagttttattggcagttttataaaaagacatcttctctagaaattgctaactttaggtccattttactgtgaatgaggaataggagtgagttttagaataacagatttttaaaaatccagatgatttgattaaaaccttaatcatacattgacataattcattgcttcttttttttgagatatggagtcttgctgtgttgcccaggcaggagtgcagtggtatgatctcagctcactgcaacctctgcctcccgggttcaactgattctcctgcctcagcctccctggtagctaggattacaggtgcccgccaccatgcctggctaacttttgtagttttagtagagacggggttttgcctgttggccaggctggtcttgaactcctgacctcaagtgatccatccaccttggcctcccaaagtgctgggattacgggcgtgagccactgtccctggcctcattgttcccttttctactttaaggaaagttttcatgtttaatcatctggggaaagtatgtgaaaaatatttgttaagaagtatctctttggagccaagccacctgtcttggtttctttctactaagagccataaagtatagaaatacttctagttgttaagtgcttatatttgtacctagatttagtcacacgcttttgagaaaacatctagtatgttatgatcagctattcctgagagcttggttgttaatctatatttctatttcttagtggtagtcatctttgatgaataagactaaagattctcacaggtttaaaattttatgtctactttaagggtaaaattatgaggttatggttctgggtgggttttctctagctaattcatatctcaaagagtctcaaaatgttgaatttcagtgcaagctgaatgagagatgagccatgtacacccaccgtaagacctcattccatgtttgtccagtgcctttcagtgcattatcaaagggaatccttcatggtgttgcctttattttccggggagtagatcgtgggatatagtctatctcatttttaatagtttaccgcccctggtatacaaagataatgacaataaatcactgccatataaccttgctttttccagaaacatggctgttttgtattgctgtaaccactaaataggttgcctataccattcctcctgtgaacagtgcagatttacaggttgcatggtctggcttaaggagagccatacttgagacatgtgagtaaactgaactcatattagctgtgctgcatttcagacttaaaatccatttttgtggggcagggtgtggtgtgtaaaggggggtgtttgtaatacaagttgaaggcaaaataaaatgtcctgtctcccagatgatatacatcttattatttttaaagtttattgctaattgtaggaaggtgagttgcaggtatctttgactatggtcatctggggaaggaaaattttacattttactattaatgctccttaagtgtctatggaggttaaagaataaaatggtaaatgtttctgtgcctggtttgatggtaactggttaatagttactcaccattttatgcagagtcacattagttcacaccctttctgagagccttttgggagaagcagttttattctctgagtggaacagagttctttttgttgataatttctagtttgctcccttcgttattgccaactttactggcattttatttaatgatagcagattgggaaaatggcaaatttaggttacggaggtaaatgagtatatgaaagcaattacctctaaagccagttaacaattattttgtaggtggggtacactcagcttaaagtaatgcatttttttttcccgtaaaggcagaatccatcttgttgcagatagctatctaaataatctcatatcctcttttgcaaagactacagagaataggctatgacaatcttgttcaagcctttccatttttttccctgataactaagtaatttctttgaacataccaagaagtatgtaaaaagtccatggccttattcatccacaaagtggcatcctaggcccagccttatccctagcagttgtcccagtgctgctaggttgcttatcttgtttatctggaatcactgtggagtgaaattttccacatcatccagaattgccttatttaagaagtaaaacgttttaatttttagcctttttttggtggagttatttaatatgtatatcagaggatatactagatggtaacatttctttctgtgcttggctatctttgtggacttcaggggcttctaaaacagacaggactgtgttgcctttactaaatggtctgagacagctatggttttgaatttttagttttttttttttaacccacttcccctcctggtctcttccctctctgataattaccattcatatgtgagtgttagtgtgcctccttttagcattttcttcttctctttctgattcttcatttctgactgcctaggcaaggaaaccagataaccaaacttactagaacgttctttaaaacacaagtacaaactctgggacaggacccaagacactttcctgtgaagtgctgaaaaagacctcattgtattggcatttgatatcagtttgatgtagcttagagtgcttcctgattcttgctgagtttcaggtagttgagatagagagaagtgagtcatattcatattttcccccttagaataatattttgaaaggtttcattgcttccacttgaatgctgctcttacaaaaactggggttacaagggttactaaattagcatcagtagccagaggcaataccgttgtctggaggacaccagcaaacaacacacaacaaagcaaaacaaaccttgggaaactaaggccatttgttttgttttggtgtcccctttgaagccctgccttctggccttactcctgtacagatatttttgacctataggtgcctttatgagaattgagggtctgacatcctgccccaaggagtagctaaagtaattgctagtgttttcagggattttaacatcagactggaatgaatgaatgaaactttttgtcctttttttttctgtttttttttttctaatgtagtaaggactaaggaaaacctttggtgaagacaatcatttctctctgttgatgtggatacttttcacaccgtttatttaaatgctttctcaataggtccagagccagtgttcttgttcaacctgaaagtaatggctctgggttgggccagacagttgcactctctagtttgccctctgccacaaatttgatgtgtgacctttgggcaagtcatttatcttctctgggccttagttgcctcatctgtaaaatgagggagttggagtagattaattattccagctctgaaattctaagtgaccttggctaccttgcagcagttttggatttcttccttatctttgttctgctgtttgagggggctttttacttatttccatgttattcaaaggagactaggcttgatattttattactgttcttttatggacaaaaggttacatagtatgcccttaagacttaattttaaccaaaggcctagcaccaccttaggggctgcaataaacacttaacgcgcgtgcgcacgcgcgcgcgcacacacacacacacacacacacacacacacaggtcagagtttaaggctttcgagtcatgacattctagcttttgaattgcgtgcacacacacacgcacgcacacactctggtcagagtttattaaggctttcgagtcatgacattatagcttttgagttggtgtgtgtgacaccaccctcctaagtggtgtgtgcttgtaattttttttttcagtgaaaatggattgaaaacctgttgttaatgcttagtgatattatgctcaaaacaaggaaattcccttgaaccgtgtcaattaaactggtttatatgactcaagaaaacaataccagtagatgattattaactttattcttggctctttttaggtccattttgattaagtgacttttggctggatcattcagagctctcttctagcctacccttggatgagtacaattaatgaaattcatattttcaaggacctgggagccttccttggggctgggttgagggtggggggttggggagtcctggtagaggccagctttgtggtagctggagaggaagggatgaaaccagctgctgttgcaaaggctgcttgtcattgatagaaggactcacgggcttggattgattaagactaaacatggagttggcaaactttcttcaagtattgagttctgttcaatgcattggacatgtgatttaagggaaaagtgtgaatgcttatagatgatgaaaacctggtgggctgcagagcccagtttagaagaagtgagttgggggttggggacagatttggtggtggtatttcccaactgtttcctcccctaaattcagaggaatgcagctatgccagaagccagagaagagccactcgtagcttctgctttggggacaactggtcagttgaaagtcccaggagttcctttgtggctttctgtatacttttgcctggttaaagtctgtggctaaaaaatagtcgaacctttcttgagaactctgtaacaaagtatgtttttgattaaaagagaaagccaactaaaaaaaaaaaaaaaaaaaa

SEQ ID NO: 191 - DNA, 1216 bp, Homo sapiens
  gene (1)..(1216): Accession No. NM_003745
ggcagctgcacggctcctggccccggagcatgcgcgagagccgccccggagcgccccggagccccccgccgtcccgcccgcggcgtcccgcgccccgccgccagcgcacccccggacgctatggcccacccctccggctggccccttctgtaggatggtagcacacaaccaggtggcagccgacaatgcagtctccacagcagcagagccccgacggcggccagaaccttcctcctcttcctcctcctcgcccgcggcccccgcgcgcccgcggccgtgccccgcggtcccggccccggcccccggcgacacgcacttccgcacattccgttcgcacgccgattaccggcgcatcacgcgcgccagcgcgctcctggacgcctgcggattctactgggggcccctgagcgtgcacggggcgcacgagcggctgcgcgccgagcccgtgggcaccttcctggtgcgcgacagccgccagcggaactgctttttcgcccttagcgtgaagatggcctcgggacccacgagcatccgcgtgcactttcaggccggccgctttcacctggatggcagccgcgagagcttcgactgcctcttcgagctgctggagcactacgtggcggcgccgcgccgcatgctgggggccccgctgcgccagcgccgcgtgcggccgctgcaggagctgtgccgccagcgcatcgtggccaccgtgggccgcgagaacctggctcgcatccccctcaaccccgtcctccgcgactacctgagctccttccccttccagatttgaccggcagcgcccgccgtgcacgcagcattaactgggatgccgtgttattttgttattacttgcctggaaccatgtgggtaccctccccggcctgggttggagggagcggatgggtgtaggggcgaggcgcctcccgccctcggctggagacgaggccgcagaccccttctcacctcttgagggggtcctccccctcctggtgctccctctgggtccccctggttgttgtagcagcttaactgtatctggagccaggacctgaactcgcacctcctacctcttcatgtttacatatacccagtatctttgcacaaaccaggggttgggggagggtctctggctttatttttctgctgtgcagaatcctattttatattttttaaagtcagtttaggtaataaactttattatgaaagtttttttttt

SEQ ID NO: 192 - DNA, 4044 bp, Homo sapiens
  gene (1)..(4044): Accession No. NM_198291
gccggagcggccaggccgccgtctgcccgtcccgctggacgtcccgcggtccgccctcccgtgcgtccgtctgccggtgagcccgcccgcccgccggcccagaacagagaacagaagctcagagaagtgaagcaacttgcccagctatgagagacagagccaggatttgaaaccagatgaggacgctgaggcccagagagggaaagccacttgcctagggacacacagcggggagaggtggagcagggcctctatttcgagacccctgactccacacctggtgtttgtgccaagaccccaggctgcctcccaggtcctctgggacagcccctgccttctaccaggaccatgggtagcaacaagagcaagcccaaggatgccagccagcggcgccgcagcctggagcccgccgagaacgtgcacggcgctggcgggggcgctttccccgcctcgcagacccccagcaagccagcctcggccgacggccaccgcggccccagcgcggccttcgcccccgcggccgccgagcccaagctgttcggaggcttcaactcctcggacaccgtcacctccccgcagagggcgggcccgctggccggtggagtgaccacctttgtggccctctatgactatgagtctaggacggagacagacctgtccttcaagaaaggcgagcggctccagattgtcaacaacacagagggagactggtggctggcccactcgctcagcacaggacagacaggctacatccccagcaactacgtggcgccctccgactccatccaggctgaggagtggtattttggcaagatcaccagacgggagtcagagcggttactgctcaatgcagagaacccgagagggaccttcctcgtgcgagaaagtgagaccacgaaaggtgcctactgcctctcagtgtctgacttcgacaacgccaagggcctcaacgtgaagcactacaagatccgcaagctggacagcggcggcttctacatcacctcccgcacccagttcaacagcctgcagcagctggtggcctactactccaaacacgccgatggcctgtgccaccgcctcaccaccgtgtgccccacgtccaagccgcagactcagggcctggccaaggatgcctgggagatccctcgggagtcgctgcggctggaggtcaagctgggccagggctgctttggcgaggtgtggatggggacctggaacggtaccaccagggtggccatcaaaaccctgaagcctggcacgatgtctccagaggccttcctgcaggaggcccaggtcatgaagaagctgaggcatgagaagctggtgcagttgtatgctgtggtttcagaggagcccatttacatcgtcacggagtacatgagcaaggggagtttgctggactttctcaagggggagacaggcaagtacctgcggctgcctcagctggtggacatggctgctcagatcgcctcaggcatggcgtacgtggagcggatgaactacgtccaccgggaccttcgtgcagccaacatcctggtgggagagaacctggtgtgcaaagtggccgactttgggctggctcggctcattgaagacaatgagtacacggcgcggcaaggtgccaaattccccatcaagtggacggctccagaagctgccctctatggccgcttcaccatcaagtcggacgtgtggtccttcgggatcctgctgactgagctcaccacaaagggacgggtgccctaccctgggatggtgaaccgcgaggtgctggaccaggtggagcggggctaccggatgccctgcccgccggagtgtcccgagtccctgcacgacctcatgtgccagtgctggcggaaggagcctgaggagcggcccaccttcgagtacctgcaggccttcctggaggactacttcacgtccaccgagccccagtaccagcccggggagaacctctaggcacaggcgggcccagaccggcttctcggcttggatcctgggctgggtggcccctgtctcggggcttgccccactctgcctgcctgctgttggtcctctctctgtggggctgaattgccaggggcgaggcccttcctctttggtggcatggaaggggcttctggacctagggtggcctgagagggcggtgggtatgcgagaccagcacggtgactctgtccagctcccgctgtggccgcacgcctctccctgcactccctcctggagctctgtgggtctctggaagaggaaccaggagaagggctggggccggggctgagggtgcccttttccagcctcagcctactccgctcactgaactccttccccacttctgtgccacccccggtctatgtcgagagctggccaaagagcctttccaaagaggagcgatgggcccctggccccgcctgcctgccaccctgccccttgccatccattctggaaacacctgtaggcagaggctgccgagacagaccctctgccgctgcttccaggctgggcagcacaaggccttgcctggcctgatgatggtgggtgggtgggatgagtaccccctcaaaccctgccctccttagacctgagggacccttcgagatcatcacttccttgcccccatttcacccatggggagacagttgagagcggggatgtgacatgcccaaggccacggagcagttcagagtggaggcgggcttggaacccggtgctccctctgtcatcctcaggaaccaacaattcgtcggaggcatcatggaaagactgggacagcccaggaaacaaggggtctgaggatgcattcgagatggcagattcccactgccgctgcccgctcagcccagctgttgggaacagcatggaggcagatgtggggctgagctggggaatcagggtaaaaggtgcaggtgtggagagagaggcttcaatcggcttgtgggtgatgtttgaccttcagagccagccggctatgaaagggagcgagcccctcggctctggaggcaatcaagcagacatagaagagccaagagtccaggaggccctggtcctggcctccttccccgtactttgtcccgtggcatttcaattcctggccctgttctcctccccaagtcggcaccctttaactcatgaggagggaaaagagtgcctaagcgggggtgaaagaggacgtgttacccactgccatgcaccaggactggctgtgtaaccttgggtggcccctgctgtctctctgggctgcagagtctgccccacatgtggccatggcctctgcaactgctcagctctggtccaggccctgtggcaggacacacatggtgagcctagccctgggacatcaggagactgggctctggctctgttcggcctttgggtgtgtggtggattctccctgggcctcagtgtgcccatctgtaaaggggcagctgacagtttgtggcatcttgccaagggtccctgtgtgtgtgtatgtgtgtgcatgtgtgcgtgtctccatgtgcgtccatatttaacatgtaaaaatgtcccccccgctccgtcccccaaacatgttgtacatttcaccatggccccctcatcatagcaataacattcccactgccaggggttcttgagccagccaggccctgccagtggggaaggaggccaagcagtgcctgcctatgaaatttcaacttttcctttcatacgtctttattacccaagtcttctcccgtccattccagtcaaatctgggctcactcaccccagcgagctctcaaatccctctccaactgcctaaggccctttgtgtaaggtgtcttaatactgtcctttttttttttttaacagtgttttgtagatttcagatgactatgcagaggcctgggggacccctggctctgggccgggcctggggctccgaaattccaaggcccagacttgcggggggtgggggggtatccagaattggttgtaaatactttgcatattgtctgattaaacacaaacagacctcagaaaaaaaaaaaaaaaaaaaaaaaaaaaaaaaaaaaaaaaaaaaaaaaa

SEQ ID NO: 193 - DNA, 4015 bp, Homo sapiens
  gene (1)..(4015): Accession No. NM_003219
gcagcgctgcgtcctgctgcgcacgtgggaagccctggccccggccacccccgcgatgccgcgcgctccccgctgccgagccgtgcgctccctgctgcgcagccactaccgcgaggtgctgccgctggccacgttcgtgcggcgcctggggccccagggctggcggctggtgcagcgcggggacccggcggctttccgcgcgctggtggcccagtgcctggtgtgcgtgccctgggacgcacggccgccccccgccgccccctccttccgccaggtgtcctgcctgaaggagctggtggcccgagtgctgcagaggctgtgcgagcgcggcgcgaagaacgtgctggccttcggcttcgcgctgctggacggggcccgcgggggcccccccgaggccttcaccaccagcgtgcgcagctacctgcccaacacggtgaccgacgcactgcgggggagcggggcgtgggggctgctgctgcgccgcgtgggcgacgacgtgctggttcacctgctggcacgctgcgcgctctttgtgctggtggctcccagctgcgcctaccaggtgtgcgggccgccgctgtaccagctcggcgctgccactcaggcccggcccccgccacacgctagtggaccccgaaggcgtctgggatgcgaacgggcctggaaccatagcgtcagggaggccggggtccccctgggcctgccagccccgggtgcgaggaggcgcgggggcagtgccagccgaagtctgccgttgcccaagaggcccaggcgtggcgctgcccctgagccggagcggacgcccgttgggcaggggtcctgggcccacccgggcaggacgcgtggaccgagtgaccgtggtttctgtgtggtgtcacctgccagacccgccgaagaagccacctctttggagggtgcgctctctggcacgcgccactcccacccatccgtgggccgccagcaccacgcgggccccccatccacatcgcggccaccacgtccctgggacacgccttgtcccccggtgtacgccgagaccaagcacttcctctactcctcaggcgacaaggagcagctgcggccctccttcctactcagctctctgaggcccagcctgactggcgctcggaggctcgtggagaccatctttctgggttccaggccctggatgccagggactccccgcaggttgccccgcctgccccagcgctactggcaaatgcggcccctgtttctggagctgcttgggaaccacgcgcagtgcccctacggggtgctcctcaagacgcactgcccgctgcgagctgcggtcaccccagcagccggtgtctgtgcccgggagaagccccagggctctgtggcggcccccgaggaggaggacacagacccccgtcgcctggtgcagctgctccgccagcacagcagcccctggcaggtgtacggcttcgtgcgggcctgcctgcgccggctggtgcccccaggcctctggggctccaggcacaacgaacgccgcttcctcaggaacaccaagaagttcatctccctggggaagcatgccaagctctcgctgcaggagctgacgtggaagatgagcgtgcgggactgcgcttggctgcgcaggagcccaggggttggctgtgttccggccgcagagcaccgtctgcgtgaggagatcctggccaagttcctgcactggctgatgagtgtgtacgtcgtcgagctgctcaggtctttcttttatgtcacggagaccacgtttcaaaagaacaggctctttttctaccggaagagtgtctggagcaagttgcaaagcattggaatcagacagcacttgaagagggtgcagctgcgggagctgtcggaagcagaggtcaggcagcatcgggaagccaggcccgccctgctgacgtccagactccgcttcatccccaagcctgacgggctgcggccgattgtgaacatggactacgtcgtgggagccagaacgttccgcagagaaaagagggccgagcgtctcacctcgagggtgaaggcactgttcagcgtgctcaactacgagcgggcgcggcgccccggcctcctgggcgcctctgtgctgggcctggacgatatccacagggcctggcgcaccttcgtgctgcgtgtgcgggcccaggacccgccgcctgagctgtactttgtcaaggtggatgtgacgggcgcgtacgacaccatcccccaggacaggctcacggaggtcatcgccagcatcatcaaaccccagaacacgtactgcgtgcgtcggtatgccgtggtccagaaggccgcccatgggcacgtccgcaaggccttcaagagccacgtctctaccttgacagacctccagccgtacatgcgacagttcgtggctcacctgcaggagaccagcccgctgagggatgccgtcgtcatcgagcagagctcctccctgaatgaggccagcagtggcctcttcgacgtcttcctacgcttcatgtgccaccacgccgtgcgcatcaggggcaagtcctacgtccagtgccaggggatcccgcagggctccatcctctccacgctgctctgcagcctgtgctacggcgacatggagaacaagctgtttgcggggattcggcgggacgggctgctcctgcgtttggtggatgatttcttgttggtgacacctcacctcacccacgcgaaaaccttcctcaggaccctggtccgaggtgtccctgagtatggctgcgtggtgaacttgcggaagacagtggtgaacttccctgtagaagacgaggccctgggtggcacggcttttgttcagatgccggcccacggcctattcccctggtgcggcctgctgctggatacccggaccctggaggtgcagagcgactactccagctatgcccggacctccatcagagccagtctcaccttcaaccgcggcttcaaggctgggaggaacatgcgtcgcaaactctttggggtcttgcggctgaagtgtcacagcctgtttctggatttgcaggtgaacagcctccagacggtgtgcaccaacatctacaagatcctcctgctgcaggcgtacaggtttcacgcatgtgtgctgcagctcccatttcatcagcaagtttggaagaaccccacatttttcctgcgcgtcatctctgacacggcctccctctgctactccatcctgaaagccaagaacgcagggatgtcgctgggggccaagggcgccgccggccctctgccctccgaggccgtgcagtggctgtgccaccaagcattcctgctcaagctgactcgacaccgtgtcacctacgtgccactcctggggtcactcaggacagcccagacgcagctgagtcggaagctcccggggacgacgctgactgccctggaggccgcagccaacccggcactgccctcagacttcaagaccatcctggactgatggccacccgcccacagccaggccgagagcagacaccagcagccctgtcacgccgggctctacgtcccagggagggaggggcggcccacacccaggcccgcaccgctgggagtctgaggcctgagtgagtgtttggccgaggcctgcatgtccggctgaaggctgagtgtccggctgaggcctgagcgagtgtccagccaagggctgagtgtccagcacacctgccgtcttcacttccccacaggctggcgctcggctccaccccagggccagcttttcctcaccaggagcccggcttccactccccacataggaatagtccatccccagattcgccattgttcacccctcgccctgccctcctttgccttccacccccaccatccaggtggagaccctgagaaggaccctgggagctctgggaatttggagtgaccaaaggtgtgccctgtacacaggcgaggaccctgcacctggatgggggtccctgtgggtcaaattggggggaggtgctgtgggagtaaaatactgaatatatgagtttttcagttttgaaaaaaa

SEQ ID NO: 194 - DNA, 5820 bp, Homo sapiens
  gene (1)..(5820): Accession No. NM_003246
agccgctgcgcccgagctggcctgcgagttcagggctcctgtcgctctccaggagcaacctctactccggacgcacaggcattccccgcgcccctccagccctcgccgccctcgccaccgctcccggccgccgcgctccggtacacacaggatccctgctgggcaccaacagctccaccatggggctggcctggggactaggcgtcctgttcctgatgcatgtgtgtggcaccaaccgcattccagagtctggcggagacaacagcgtgtttgacatctttgaactcaccggggccgcccgcaaggggtctgggcgccgactggtgaagggccccgacccttccagcccagctttccgcatcgaggatgccaacctgatcccccctgtgcctgatgacaagttccaagacctggtggatgctgtgcgggcagaaaagggtttcctccttctggcatccctgaggcagatgaagaagacccggggcacgctgctggccctggagcggaaagaccactctggccaggtcttcagcgtggtgtccaatggcaaggcgggcaccctggacctcagcctgaccgtccaaggaaagcagcacgtggtgtctgtggaagaagctctcctggcaaccggccagtggaagagcatcaccctgtttgtgcaggaagacagggcccagctgtacatcgactgtgaaaagatggagaatgctgagttggacgtccccatccaaagcgtcttcaccagagacctggccagcatcgccagactccgcatcgcaaaggggggcgtcaatgacaatttccagggggtgctgcagaatgtgaggtttgtctttggaaccacaccagaagacatcctcaggaacaaaggctgctccagctctaccagtgtcctcctcacccttgacaacaacgtggtgaatggttccagccctgccatccgcactaactacattggccacaagacaaaggacttgcaagccatctgcggcatctcctgtgatgagctgtccagcatggtcctggaactcaggggcctgcgcaccattgtgaccacgctgcaggacagcatccgcaaagtgactgaagagaacaaagagttggccaatgagctgaggcggcctcccctatgctatcacaacggagttcagtacagaaataacgaggaatggactgttgatagctgcactgagtgtcactgtcagaactcagttaccatctgcaaaaaggtgtcctgccccatcatgccctgctccaatgccacagttcctgatggagaatgctgtcctcgctgttggcccagcgactctgcggacgatggctggtctccatggtccgagtggacctcctgttctacgagctgtggcaatggaattcagcagcgcggccgctcctgcgatagcctcaacaaccgatgtgagggctcctcggtccagacacggacctgccacattcaggagtgtgacaagagatttaaacaggatggtggctggagccactggtccccgtggtcatcttgttctgtgacatgtggtgatggtgtgatcacaaggatccggctctgcaactctcccagcccccagatgaacgggaaaccctgtgaaggcgaagcgcgggagaccaaagcctgcaagaaagacgcctgccccatcaatggaggctggggtccttggtcaccatgggacatctgttctgtcacctgtggaggaggggtacagaaacgtagtcgtctctgcaacaaccccacaccccagtttggaggcaaggactgcgttggtgatgtaacagaaaaccagatctgcaacaagcaggactgtccaattgatggatgcctgtccaatccctgctttgccggcgtgaagtgtactagctaccctgatggcagctggaaatgtggtgcttgtccccctggttacagtggaaatggcatccagtgcacagatgttgatgagtgcaaagaagtgcctgatgcctgcttcaaccacaatggagagcaccggtgtgagaacacggaccccggctacaactgcctgccctgccccccacgcttcaccggctcacagcccttcggccagggtgtcgaacatgccacggccaacaaacaggtgtgcaagccccgtaacccctgcacggatgggacccacgactgcaacaagaacgccaagtgcaactacctgggccactatagcgaccccatgtaccgctgcgagtgcaagcctggctacgctggcaatggcatcatctgcggggaggacacagacctggatggctggcccaatgagaacctggtgtgcgtggccaatgcgacttaccactgcaaaaaggataattgccccaaccttcccaactcagggcaggaagactatgacaaggatggaattggtgatgcctgtgatgatgacgatgacaatgataaaattccagatgacagggacaactgtccattccattacaacccagctcagtatgactatgacagagatgatgtgggagaccgctgtgacaactgtccctacaaccacaacccagatcaggcagacacagacaacaatggggaaggagacgcctgtgctgcagacattgatggagacggtatcctcaatgaacgggacaactgccagtacgtctacaatgtggaccagagagacactgatatggatggggttggagatcagtgtgacaattgccccttggaacacaatccggatcagctggactctgactcagaccgcattggagatacctgtgacaacaatcaggatattgatgaagatggccaccagaacaatctggacaactgtccctatgtgcccaatgccaaccaggctgaccatgacaaagatggcaagggagatgcctgtgaccacgatgatgacaacgatggcattcctgatgacaaggacaactgcagactcgtgcccaatcccgaccagaaggactctgacggcgatggtcgaggtgatgcctgcaaagatgattttgaccatgacagtgtgccagacatcgatgacatctgtcctgagaatgttgacatcagtgagaccgatttccgccgattccagatgattcctctggaccccaaagggacatcccaaaatgaccctaactgggttgtacgccatcagggtaaagaactcgtccagactgtcaactgtgatcctggactcgctgtaggttatgatgagtttaatgctgtggacttcagtggcaccttcttcatcaacaccgaaagggacgatgactatgctggatttgtctttggctaccagtccagcagccgcttttatgttgtgatgtggaagcaagtcacccagtcctactgggacaccaaccccacgagggctcagggatactcgggcctttctgtgaaagttgtaaactccaccacagggcctggcgagcacctgcggaacgccctgtggcacacaggaaacacccctggccaggtgcgcaccctgtggcatgaccctcgtcacataggctggaaagatttcaccgcctacagatggcgtctcagccacaggccaaagacgggtttcattagagtggtgatgtatgaagggaagaaaatcatggctgactcaggacccatctatgataaaacctatgctggtggtagactagggttgtttgtcttctctcaagaaatggtgttcttctctgacctgaaatacgaatgtagagatccctaatcatcaaattgttgattgaaagactgatcataaaccaatgctggtattgcaccttctggaactatgggcttgagaaaacccccaggatcacttctccttggcttccttcttttctgtgcttgcatcagtgtggactcctagaacgtgcgacctgcctcaagaaaatgcagttttcaaaaacagactcagcattcagcctccaatgaataagacatcttccaagcatataaacaattgctttggtttccttttgaaaaagcatctacttgcttcagttgggaaggtgcccattccactctgcctttgtcacagagcagggtgctattgtgaggccatctctgagcagtggactcaaaagcattttcaggcatgtcagagaagggaggactcactagaattagcaaacaaaaccaccctgacatcctccttcaggaacacggggagcagaggccaaagcactaaggggagggcgcatacccgagacgattgtatgaagaaaatatggaggaactgttacatgttcggtactaagtcattttcaggggattgaaagactattgctggatttcatgatgctgactggcgttagctgattaacccatgtaaataggcacttaaatagaagcaggaaagggagacaaagactggcttctggacttcctccctgatccccacccttactcatcacctgcagtggccagaattagggaatcagaatcaaaccagtgtaaggcagtgctggctgccattgcctggtcacattgaaattggtggcttcattctagatgtagcttgtgcagatgtagcaggaaaataggaaaacctaccatctcagtgagcaccagctgcctcccaaaggaggggcagccgtgcttatatttttatggttacaatggcacaaaattattatcaacctaactaaaacattccttttctcttttttcctgaattatcatggagttttctaattctctcttttggaatgtagattttttttaaatgctttacgatgtaaaatatttattttttacttattctggaagatctggctgaaggattattcatggaacaggaagaagcgtaaagactatccatgtcatctttgttgagagtcttcgtgactgtaagattgtaaatacagattatttattaactctgttctgcctggaaatttaggcttcatacggaaagtgtttgagagcaagtagttgacatttatcagcaaatctcttgcaagaacagcacaaggaaaatcagtctaataagctgctctgccccttgtgctcagagtggatgttatgggattctttttttctctgttttatcttttcaagtggaattagttggttatccatttgcaaatgttttaaattgcaaagaaagccatgaggtcttcaatactgttttaccccatcccttgtgcatatttccagggagaaggaaagcatatacacttttttctttcatttttccaaaagagaaaaaaatgacaaaaggtgaaacttacatacaaatattacctcatttgttgtgtgactgagtaaagaatttttggatcaagcggaaagagtttaagtgtctaacaaacttaaagctactgtagtacctaaaaagtcagtgttgtacatagcataaaaactctgcagagaagtattcccaataaggaaatagcattgaaatgttaaatacaatttctgaaagttatgttttttttctatcatctggtataccattgctttatttttataaattattttctcattgccattggaatagatatctcagattgtgtagatatgctatttaaataatttatcaggaaatactgcctgtagagttagtatttctatttttatataatgtttgcacactgaattgaagaattgttggttttttcttttttttgttttgtttttttttttttttttttttgcttttgacctcccatttttactatttgccaatacctttttctaggaatgtgcttttttttgtacacatttttatccattttacattctaaagcagtgtaagttgtatattactgtttcttatgtacaaggaacaacaataaatcatatggaaatttatatttataaaaaaaaaaaaaaaaaaaaaaaaaaaaaaa

SEQ ID NO: 195 - DNA, 5496 bp, Homo sapiens
  gene (1)..(5496): Accession No. NM_000362
ctgtggcttgccccagagctgatccttgtctttgtccacttctcagcgaggatggcacttcagggagcccttcccttactatcgcagagagagcaggccctccccagtcatgtccaacccagaactctgttttgttttcttcatagccctagcatcacagaaaatcaccctgtgcattcatggatgtccacgggggcaagggctttgtgttgcttaacccagcatcctgaaccgtgtttgttgaatgaatacagaaccccgtttgctctgggagagcacagaaaacagtcttctatcatatatcatagccagctgcaaacagcagatggcttcccatatcccagagagtaagaaccagagagagagagaaagagagagagtttgggtctttctcctctgtgcctgctctctccagagaaactggaggggtagcagttagcattcccccgctggttccaccaagcacagtcaaggtctctaggacatggccacccctcacctgtggaagcggtcctgctggggtgggtgggtgttagttggttctggtttgggtcagagacacccagtggcccaggtgggcgtggggccagggcgcagacgagaaggggcacgagggctccgctccgaggacccagcggcaagcaccggtcccgggcgcgccccagcccacccactcgcgtgcccacggcggcattattccctataaggatctgaacgatccgggggcggccccgccccgttaccccttgcccccggccccgccccctttttggagggccgatgaggtaatgcggctctgccattggtctgagggggcgggccccaacagcccgaggcggggtccccgggggcccagcgctatatcactcggccgcccaggcagcggcgcagagcgggcagcaggcaggcggcgggcgctcagacggcttctcctcctcctcttgctcctccagctcctgctccttcgccgggaggccgcccgccgagtcctgcgccagcgccgaggcagcctcgctgcgccccatcccgtcccgccgggcactcggagggcagcgcgccggaggccaaggttgccccgcacggcccggcgggcgagcgagctcgggctgcagcagccccgccggcggcgcgcacggcaactttggagaggcgagcagcagccccggcagcggcggcagcagcggcaatgaccccttggctcgggctcatcgtgctcctgggcagctggagcctgggggactggggcgccgaggcgtgcacatgctcgcccagccacccccaggacgccttctgcaactccgacatcgtgatccgggccaaggtggtggggaagaagctggtaaaggaggggcccttcggcacgctggtctacaccatcaagcagatgaagatgtaccgaggcttcaccaagatgccccatgtgcagtacatccatacggaagcttccgagagtctctgtggccttaagctggaggtcaacaagtaccagtacctgctgacaggtcgcgtctatgatggcaagatgtacacggggctgtgcaacttcgtggagaggtgggaccagctcaccctctcccagcgcaaggggctgaactatcggtatcacctgggttgtaactgcaagatcaagtcctgctactacctgccttgctttgtgacttccaagaacgagtgtctctggaccgacatgctctccaatttcggttaccctggctaccagtccaaacactacgcctgcatccggcagaagggcggctactgcagctggtaccgaggatgggcccccccggataaaagcatcatcaatgccacagacccctgagcgccagaccctgccccacctcacttccctcccttcccgctgagcttcccttggacactaactcttcccagatgatgacaatgaaattagtgcctgttttcttgcaaatttagcacttggaacatttaaagaaaggtctatgctgtcatatggggtttattgggaactatcctcctggccccaccctgccccttctttttggttttgacatcattcatttccacctgggaatttctggtgccatgccagaaagaatgaggaacctgtattcctcttcttcgtgataatataatctctatttttttaggaaaacaaaaatgaaaaactactccatttgaggattgtaattcccacccctcttgcttcttccccacctcaccatctcccagaccctcttccctttgcccttctcctccaatacataaaggacacagacaaggaacttgctgaaaggccaaccatttcaggatcagtcaaaggcagcaagcagatagactcaaggtgtgtgaaagatgttatacaccaggagctgccactgcatgtcccaaccagactgtgtctgtctgtgtctgcatgtaagagtgagggagggaaggaaggaactacaagagagtcggagatgatgcagcacacacacaattccccagcccagtgatgcttgtgttgaccagatgttcctgagtctggagcaagcacccaggccagaataacagagctttcttagttggtgaagacttaaacatctgcctgaggtcaggaggcaatttgcctgccttgtacaaaagctcaggtgaaagactgagatgaatgtctttcctctccctgcctcccaccagacttcctcctggaaaacgctttggtagatttggccaggagctttcttttatgtaaattggataaatacacacaccatacactatccacagatatagccaagtagatttgggtagaggatactatttccagaatagtgtttagctcacctagggggatatgtttgtatacacatttgcatatacccacatggggacataagctaatttttttacaggacacagaattctgttcaatgctgttaaatatgccaatagtttaatctcttctattttgttgtcgttgcttgtttgaagaaaatcatgacattccaagttgacatttttttttcattttaattaaaatttgaaattctgaacaccgtcagcaccctctcttccctatcatgggtcatctgacccctgtccgtctccttgtccctgcttcatgtttgggggcctttctttaactgccttcctggcttagctcagatggcagatgagagtgtagtcaagggcctgggcacaggagggagagctgcagagtgtcctgcctgccttggctggagggacacctctcctgggtgtggagacagcttggttccctttccctagctccctggtgggtgaatgccacctcctgagatcctcacctcttggaattaaaattgttggtcactggggaaagcctgagtttgcaaccagttgtagggtttctgttgtgtttttttttttttttttgaaataaaactataatataaattctcctattaaataaaattattttaagttttagtgtcaaaagtgagatgctgagagtaggtgataatgtatattttacagagtgggggttggcaggatggtgacattgaacatgattgctctctgtctcttttttcagcttatgggtatttatcttctattagtatttgtatcttcagttcattccactttaggaaacagagctgccaattgaaacagaagaagaaaaaaaaaaaaagcagcagacaacacactgtagagtcttgcacacacacaagtgcccaggcaaggtgcttggcagaaccgcagagtgggaagagagtaccggcatcgggtttccttgggatcaatttcattaccgtgtacctttcccattgtggtcatgccatttggcagggggagaatgggaggcttggccttctttgtgaggcagtgtgagcagaagctgatgccagcatgtcactggttttgaagggatgagcccagacttgatgttttgggattgtccttattttaacctcaaggtctcgcatggtggggcccctgaccaacctacacaagttccctcccacaagtggacatcagtgtcttctctgtgaggcatctggccattcgcactccctggtgtggtcagcctctctcacacaaggaggaacttgggtgaaggctgagtgtgaggcacctgaagtttccctgcggagtcgataaattagcagaaccacatccccatctgttaggccttggtgaggaggccctgggcaaagaagggtctttcgcaaagcgatgtcagagggcggttttgagctttctataagctatagctttgtttatttcacccgttcacttactgtataatttaaaatcatttatgtagctgagacacttctgtatttcaatcatatcatgaacattttattttgctaaatcttgtgtcatgtgtaggctgtaatatgtgtacattgtgtttaagagaaaaatgaaacccacatgccgccattttcctgaatcaaattctgcagtggaatggagaggaaaatacttctaggcaagcagctagactggtgaattgggggaaatagaaggaactagtaactgagactcctccagcctcctccctattggaatcccaatggctcctggagtaggaaaaaagtttaaactacattcatgttcttgttctgtgtcactcggccctgggtagtctaccatttacttcaccccaagtcctgctgcccatccagttgggaagccatgattttcctaagaatccagggccatgggagatacaattccaagttctcgcttcctcctttgggcatctcttctgcctcccaatcaaggaagctccatgctcaggctctcagctctcgggccagtgctctgctctgtccagggtaggtaatactgggagactcctgtcttttaccctcccctcgttccagacctgcctcatggtggcaacatggttcttgaacaattaaagaaacaaatgactttttggaatagccctgtctagggcaaactgtggcccccaggagacactacccttccatgccccagacctctgtcttgcatgtgacaattgacaatctggactaccccaagatggcacccaagtgtttggcttctggctacctaaggttaacatgtcactagagtatttttatgagagacaaacattataaaaatctgatggcaaaagcaaaacaaaatggaaagtaggggaggtggatgtgacaacaacttccaaattggctctttggaggcgagaggaaggggagaacttggagaatagtttttgctttgggggtagaggcttcttagattctcccagcatccgcctttccctttagccagtctgctgtcctgaaacccagaagtgatggagagaaaccaacaagagatctcgaaccctgtctagaaggaatgtatttgttgctaaatttcgtagcactgtttacagttttcctccatgttatttatgaattttatattccgtgaatgtatattgtcttgtaatgttgcataatgttcactttttatagtgtgtcctttattctaaacagtaaagtggttttatttctatcacaaaaaaaaaaa

SEQ ID NO: 196 - DNA, 1764 bp, Homo sapiens
  gene (1)..(1764): Accession No. NM_003844
gcaggtgccccgaaaagggggcggggtcaggggtgccctgaactccgaatgcgaagttctgtcttgtcatagccaagcacgctgcttcttggattgacctggcaggatggcgccaccaccagctagagtacatctaggtgcgttcctggcagtgactccgaatcccgggagcgcagcgagtgggacagaggcagccgcggccacacccagcaaagtgtggggctcttccgcggggaggattgaaccacgaggcgggggccgaggagcgctccctacctccatgggacagcacggacccagtgcccgggcccgggcagggcgcgccccaggacccaggccggcgcgggaagccagccctcggctccgggtccacaagaccttcaagtttgtcgtcgtcggggtcctgctgcaggtcgtacctagctcagctgcaaccatcaaacttcatgatcaatcaattggcacacagcaatgggaacatagccctttgggagagttgtgtccaccaggatctcatagatcagaacatcctggagcctgtaaccggtgcacagagggtgtgggttacaccaatgcttccaacaatttgtttgcttgcctcccatgtacagcttgtaaatcagatgaagaagagagaagtccctgcaccacgaccaggaacacagcatgtcagtgcaaaccaggaactttccggaatgacaattctgctgagatgtgccggaagtgcagcagagggtgccccagagggatggtcaaggtcaaggattgtacgccctggagtgacatcgagtgtgtccacaaagaatcaggcaatggacataatatatgggtgattttggttgtgactttggttgttccgttgctgttggtggctgtgctgattgtctgttgttgcatcggctcaggttgtggaggggaccccaagtgcatggacagggtgtgtttctggcgcttgggtctcctacgagggcctggggctgaggacaatgctcacaacgagattctgagcaacgcagactcgctgtccactttcgtctctgagcagcaaatggaaagccaggagccggcagatttgacaggtgtcactgtacagtccccaggggaggcacagtgtctgctgggaccggcagaagctgaagggtctcagaggaggaggctgctggttccagcaaatggtgctgaccccactgagactctgatgctgttctttgacaagtttgcaaacatcgtgccctttgactcctgggaccagctcatgaggcagctggacctcacgaaaaatgagatcgatgtggtcagagctggtacagcaggcccaggggatgccttgtatgcaatgctgatgaaatgggtcaacaaaactggacggaacgcctcgatccacaccctgctggatgccttggagaggatggaagagagacatgcaagagagaagattcaggacctcttggtggactctggaaagttcatctacttagaagatggcacaggctctgccgtgtccttggagtgaaagactctttttaccagaggtttcctcttaggtgttaggagttaatacatattaggttttttttttttttaacatgtatacaaagtaaattcttagccaggtgtagtggctcatgcctgtaatcccagcactttgggaggctgaggcgggtggatcacttgaggtcagaagttcaagaccagcctgaccaacatcgtgaaatgccgtctttacaaaaaaatacaaaaattaactggaaaaaaaaaaaaaaa

SEQ ID NO: 197 - DNA, 4154 bp, Homo sapiens
  gene (1)..(4154): Accession No. NM_003842
acttggacgcgcttgcggaggattgcgttgacgagactcttatttattgtcaccaacctgtggtggaatttgcagttgcacattggatctgattcgccccgccccgaatgacgcctgcccggaggcagtgaaagtacagccgcgccgccccaagtcagcctggacacataaatcagcacgcggccggagaaccccgcaatctctgcgcccacaaaatacaccgacgatgcccgatctactttaagggctgaaacccacgggcctgagagactataagagcgttccctaccgccatggaacaacggggacagaacgccccggccgcttcgggggcccggaaaaggcacggcccaggacccagggaggcgcggggagccaggcctgggccccgggtccccaagacccttgtgctcgttgtcgccgcggtcctgctgttggtctcagctgagtctgctctgatcacccaacaagacctagctccccagcagagagcggccccacaacaaaagaggtccagcccctcagagggattgtgtccacctggacaccatatctcagaagacggtagagattgcatctcctgcaaatatggacaggactatagcactcactggaatgacctccttttctgcttgcgctgcaccaggtgtgattcaggtgaagtggagctaagtccctgcaccacgaccagaaacacagtgtgtcagtgcgaagaaggcaccttccgggaagaagattctcctgagatgtgccggaagtgccgcacagggtgtcccagagggatggtcaaggtcggtgattgtacaccctggagtgacatcgaatgtgtccacaaagaatcaggtacaaagcacagtggggaagtcccagctgtggaggagacggtgacctccagcccagggactcctgcctctccctgttctctctcaggcatcatcataggagtcacagttgcagccgtagtcttgattgtggctgtgtttgtttgcaagtctttactgtggaagaaagtccttccttacctgaaaggcatctgctcaggtggtggtggggaccctgagcgtgtggacagaagctcacaacgacctggggctgaggacaatgtcctcaatgagatcgtgagtatcttgcagcccacccaggtccctgagcaggaaatggaagtccaggagccagcagagccaacaggtgtcaacatgttgtcccccggggagtcagagcatctgctggaaccggcagaagctgaaaggtctcagaggaggaggctgctggttccagcaaatgaaggtgatcccactgagactctgagacagtgcttcgatgactttgcagacttggtgccctttgactcctgggagccgctcatgaggaagttgggcctcatggacaatgagataaaggtggctaaagctgaggcagcgggccacagggacaccttgtacacgatgctgataaagtgggtcaacaaaaccgggcgagatgcctctgtccacaccctgctggatgccttggagacgctgggagagagacttgccaagcagaagattgaggaccacttgttgagctctggaaagttcatgtatctagaaggtaatgcagactctgccatgtcctaagtgtgattctcttcaggaagtcagaccttccctggtttaccttttttctggaaaaagcccaactggactccagtcagtaggaaagtgccacaattgtcacatgaccggtactggaagaaactctcccatccaacatcacccagtggatggaacatcctgtaacttttcactgcacttggcattatttttataagctgaatgtgataataaggacactatggaaatgtctggatcattccgtttgtgcgtactttgagatttggtttgggatgtcattgttttcacagcacttttttatcctaatgtaaatgctttatttatttatttgggctacattgtaagatccatctacacagtcgttgtccgacttcacttgatactatatgatatgaaccttttttgggtggggggtgcggggcagttcactctgtctcccaggctggagtgcaatggtgcaatcttggctcactatagccttgacctctcaggctcaagcgattctcccacctcagccatccaaatagctgggaccacaggtgtgcaccaccacgcccggctaattttttgtattttgtctagatataggggctctctatgttgctcagggtggtctcgaattcctggactcaagcagtctgcccacctcagactcccaaagcggtggaattagaggcgtgagcccccatgcttggccttacctttctacttttataattctgtatgttattattttatgaacatgaagaaactttagtaaatgtacttgtttacatagttatgtgaatagattagataaacataaaaggaggagacatacaatgggggaagaagaagaagtcccctgtaagatgtcactgtctgggttccagccctccctcagatgtactttggcttcaatgattggcaacttctacaggggccagtcttttgaactggacaaccttacaagtatatgagtattatttataggtagttgtttacatatgagtcgggaccaaagagaactggatccacgtgaagtcctgtgtgtggctggtccctacctgggcagtctcatttgcacccatagcccccatctatggacaggctgggacagaggcagatgggttagatcacacataacaatagggtctatgtcatatcccaagtgaacttgagccctgtttgggctcaggagatagaagacaaaatctgtctcccacgtctgccatggcatcaagggggaagagtagatggtgcttgagaatggtgtgaaatggttgccatctcaggagtagatggcccggctcacttctggttatctgtcaccctgagcccatgagctgccttttagggtacagattgcctacttgaggaccttggccgctctgtaagcatctgactcatctcagaaatgtcaattcttaaacactgtggcaacaggacctagaatggctgacgcattaaggttttcttcttgtgtcctgttctattattgttttaagacctcagtaaccatttcagcctctttccagcaaacccttctccatagtatttcagtcatggaaggatcatttatgcaggtagtcattccaggagtttttggtcttttctgtctcaaggcattgtgtgttttgttccgggactggtttgggtgggacaaagttagaattgcctgaagatcacacattcagactgttgtgtctgtggagttttaggagtggggggtgacctttctggtctttgcacttccatcctctcccacttccatctggcatcccacgcgttgtcccctgcacttctggaaggcacagggtgctgctgcctcctggtctttgcctttgctgggccttctgtgcaggacgctcagcctcagggctcagaaggtgccagtccggtcccaggtcccttgtcccttccacagaggccttcctagaagatgcatctagagtgtcagccttatcagtgtttaagatttttcttttatttttaatttttttgagacagaatctcactctctcgcccaggctggagtgcaacggtacgatcttggctcagtgcaacctccgcctcctgggttcaagcgattctcgtgcctcagcctccggagtagctgggattgcaggcacccgccaccacgcctggctaatttttgtatttttagtagagacggggtttcaccatgttggtcaggctggtctcgaactcctgacctcaggtgatccaccttggcctccgaaagtgctgggattacaggcgtgagccaccagccaggccaagctattcttttaaagtaagcttcctgacgacatgaaataattgggggttttgttgtttagttacattaggctttgctatatccccaggccaaatagcatgtgacacaggacagccatagtatagtgtgtcactcgtggttggtgtcctttcatgcttctgccctgtcaaaggtccctatttgaaatgtgttataatacaaacaaggaagcacattgtgtacaaaatacttatgtatttatgaatccatgaccaaattaaatatgaaaccttatataaaaa

SEQ ID NO: 198 - DNA, 2968 bp, Homo sapiens
  gene (1)..(2968): Accession No. NM_000551
cctcgcctccgttacaacggcctacggtgctggaggatccttctgcgcacgcgcacagcctccggccggctatttccgcgagcgcgttccatcctctaccgagcgcgcgcgaagactacggaggtcgactcgggagcgcgcacgcagctccgccccgcgtccgacccgcggatcccgcggcgtccggcccgggtggtctggatcgcggagggaatgccccggagggcggagaactgggacgaggccgaggtaggcgcggaggaggcaggcgtcgaagagtacggccctgaagaagacggcggggaggagtcgggcgccgaggagtccggcccggaagagtccggcccggaggaactgggcgccgaggaggagatggaggccgggcggccgcggcccgtgctgcgctcggtgaactcgcgcgagccctcccaggtcatcttctgcaatcgcagtccgcgcgtcgtgctgcccgtatggctcaacttcgacggcgagccgcagccctacccaacgctgccgcctggcacgggccgccgcatccacagctaccgaggtcacctttggctcttcagagatgcagggacacacgatgggcttctggttaaccaaactgaattatttgtgccatctctcaatgttgacggacagcctatttttgccaatatcacactgccagtgtatactctgaaagagcgatgcctccaggttgtccggagcctagtcaagcctgagaattacaggagactggacatcgtcaggtcgctctacgaagatctggaagaccacccaaatgtgcagaaagacctggagcggctgacacaggagcgcattgcacatcaacggatgggagattgaagatttctgttgaaacttacactgtttcatctcagcttttgatggtactgatgagtcttgatctagatacaggactggttccttccttagtttcaaagtgtctcattctcagagtaaaataggcaccattgcttaaaagaaagttaactgacttcactaggcattgtgatgtttaggggcaaacatcacaaaatgtaatttaatgcctgcccattagagaagtatttatcaggagaaggtggtggcatttttgcttcctagtaagtcaggacagcttgtatgtaaggaggtttgtataagtaattcagtgggaattgcagcatatcgtttaattttaagaaggcattggcatctgcttttaatggatgtataatacatccattctacatccgtagcggttggtgacttgtctgcctcctgctttgggaagactgaggcatccgtgaggcagggacaagtctttctcctctttgagaccccagtgcctgcacatcatgagccttcagtcagggtttgtcagaggaacaaaccaggggacactttgttagaaagtgcttagaggttctgcctctatttttgttggggggtgggagaggggaccttaaaatgtgtacagtgaacaaatgtcttaaagggaatcatttttgtaggaagcattttttataattttctaagtcgtgcactttctcggtccactcttgttgaagtgctgttttattactgtttctaaactaggattgacattctacagttgtgataatagcatttttgtaacttgccatccgcacagaaaatacgagaaaatctgcatgtttgattatagtattaatggacaaataagtttttgctaaatgtgagtatttctgttcctttttgtaaatatgtgacattcctgattgatttgggtttttttgttgttgttgttttgttttgttttgtttttttgagatggagtctcactcttgtcacccaggctggagtgcagtggcgccatctcggctcactgcaacctctgcctcctgggttcacgtaatcctcctgagtagctgggattacaggcgcctgccaccacgctggccaatttttgtacttttagtagagacagtgtttcgccatgttggccaggctggtttcaaactcctgacctcaggtgatccgcccacctcagcctcccaaaatggtgggattacaggtgtgtgggccaccgtgcctggctgattcagcattttttatcaggcaggaccaggtggcacttccacctccagcctctggtcctaccaatggattcatggagtagcctggactgtttcatagttttctaaatgtacaaattcttataggctagacttagattcattaactcaaattcaatgcttctatcagactcagttttttgtaactaatagatttttttttccacttttgttctactccttccctaatagctttttaaaaaaatctccccagtagagaaacatttggaaaagacagaaaactaaaaaggaagaaaaaagatccctattagatacacttcttaaatacaatcacattaacattttgagctatttccttccagcctttttagggcagattttggttggtttttacatagttgagattgtactgttcatacagttttataccctttttcatttaactttataacttaaatattgctctatgttagtataagcttttcacaaacattagtatagtctcccttttataattaatgtttgtgggtatttcttggcatgcatctttaattccttatcctagcctttgggcacaattcctgtgctcaaaaatgagagtgacggctggcatggtggctcccgcctgtaatcccagtactttgggaagccaaggtaagaggattgcttgagcccagaacttcaagatgagcctgggctcatagtgagaacccatctatacaaaaaatttttaaaaattagcatggcggcacacatctgtaatcctagctacttggcaggctgaggtgagaagatcattggagtttaggaattggaggctgcagtgagccatgagtatgccactgcactccagcctgggggacagagcaagaccctgcctcaaaaaaaaaaaaaaaaaa

SEQ ID NO: 199 - DNA, 2284 bp, Homo sapiens
  gene (1)..(2284): Accession No. NM_005430
gcggtgccgcccgccgtggccgcctcagcccaccagccgggaccgcgagccatgctgtccgccgcccgcccccagggttgttaaagccagactgcgaactctcgccactgccgccaccgccgcgtcccgtcccaccgtcgcgggcaacaaccaaagtcgccgcaactgcagcacagagcgggcaaagccaggcaggccatggggctctgggcgctgttgcctggctgggtttctgctacgctgctgctggcgctggccgctctgcccgcagccctggctgccaacagcagtggccgatggtggggtattgtgaacgtagcctcctccacgaacctgcttacagactccaagagtctgcaactggtactcgagcccagtctgcagctgttgagccgcaaacagcggcgtctgatacgccaaaatccggggatcctgcacagcgtgagtggggggctgcagagtgccgtgcgcgagtgcaagtggcagttccggaatcgccgctggaactgtcccactgctccagggccccacctcttcggcaagatcgtcaaccgaggctgtcgagaaacggcgtttatcttcgctatcacctccgccggggtcacccattcggtggcgcgctcctgctcagaaggttccatcgaatcctgcacgtgtgactaccggcggcgcggccccgggggccccgactggcactgggggggctgcagcgacaacattgacttcggccgcctcttcggccgggagttcgtggactccggggagaaggggcgggacctgcgcttcctcatgaaccttcacaacaacgaggcaggccgtacgaccgtattctccgagatgcgccaggagtgcaagtgccacgggatgtccggctcatgcacggtgcgcacgtgctggatgcggctgcccacgctgcgcgccgtgggcgatgtgctgcgcgaccgcttcgacggcgcctcgcgcgtcctgtacggcaaccgcggcagcaaccgcgcttcgcgggcggagctgctgcgcctggagccggaagacccggcccacaaaccgccctccccccacgacctcgtctacttcgagaaatcgcccaacttctgcacgtacagcggacgcctgggcacagcaggcacggcagggcgcgcctgtaacagctcgtcgcccgcgctggacggctgcgagctgctctgctgcggcaggggccaccgcacgcgcacgcagcgcgtcaccgagcgctgcaactgcaccttccactggtgctgccacgtcagctgccgcaactgcacgcacacgcgcgtactgcacgagtgtctgtgaggcgctgcgcggactcgcccccaggaacgctctcctcgagccctcccccaaacagactcgctagcactcaagacccggttattcgcccacccgagtacctccagtcacactccccgcggttcatacgcatcccatctctcccacttcctcctacctggggactcctcaaaccacttgcctggggcggcatgaaccctcttgccatcctgatggacctgccccggacctacctccctccctctccgcgggagaccccttgttgcactgccccctgcttggccaggaggtgagagaaggatgggtcccctccgccatggggtcggctcctgatggtgtcattctgcctgctccatcgcgccagcgacctctctgcctctcttcttcccctttgtcctgcgttttctccgggtcctcctaagtcccttcctattctcctgccatgggtgcagaccctgaacccacacctgggcatcagggcctttctcctccccacctgtagctgaagcaggaggttacagggcaaaagggcagctgtgatgatgtggaaatgaggttgggggaaccagcagaaatgcccccattctcccagtctctgtcgtggagccattgaacagctgtgagccatgcctccctgggccacctcctaccccttcctgtcctgcctcctcatcagtgtgtaaataatttgcactgaaacgtggatacagagccacgagtttggatgttgtaaataaaactatttattgtgctgggtcccagcctggtttgcaaagaccacctccaacccaacccaatccctctccactcttctctcctttctccctgcagccttttctggtccctcttctctcctcagtttctcaaagatgcgtttgcctcctggaatcagtatttccttccactgtagctattagcggctcctcgcccccaccagtgtagcatcttcctctgcagaataaaatctctattttta

SEQ ID NO: 200 - DNA, 2969 bp, Homo sapiens
  gene (1)..(2969): Accession No. NM_000378
ccaggcagctggggtaaggagttcaaggcagcgcccacacccgggggctctccgcaacccgaccgcctgtccgctcccccacttcccgccctccctcccacctactcattcacccacccacccacccagagccgggacggcagcccaggcgcccgggccccgccgtctcctcgccgcgatcctggacttcctcttgctgcaggacccggcttccacgtgtgtcccggagccggcgtctcagcacacgctccgctccgggcctgggtgcctacagcagccagagcagcagggagtccgggacccgggcggcatctgggccaagttaggcgccgccgaggccagcgctgaacgtctccagggccggaggagccgcggggcgtccgggtctgagccgcagcaaatgggctccgacgtgcgggacctgaacgcgctgctgcccgccgtcccctccctgggtggcggcggcggctgtgccctgcctgtgagcggcgcggcgcagtgggcgccggtgctggactttgcgcccccgggcgcttcggcttacgggtcgttgggcggccccgcgccgccaccggctccgccgccacccccgccgccgccgcctcactccttcatcaaacaggagccgagctggggcggcgcggagccgcacgaggagcagtgcctgagcgccttcactgtccacttttccggccagttcactggcacagccggagcctgtcgctacgggcccttcggtcctcctccgcccagccaggcgtcatccggccaggccaggatgtttcctaacgcgccctacctgcccagctgcctcgagagccagcccgctattcgcaatcagggttacagcacggtcaccttcgacgggacgcccagctacggtcacacgccctcgcaccatgcggcgcagttccccaaccactcattcaagcatgaggatcccatgggccagcagggctcgctgggtgagcagcagtactcggtgccgcccccggtctatggctgccacacccccaccgacagctgcaccggcagccaggctttgctgctgaggacgccctacagcagtgacaatttataccaaatgacatcccagcttgaatgcatgacctggaatcagatgaacttaggagccaccttaaagggccacagcacagggtacgagagcgataaccacacaacgcccatcctctgcggagcccaatacagaatacacacgcacggtgtcttcagaggcattcaggatgtgcgacgtgtgcctggagtagccccgactcttgtacggtcggcatctgagaccagtgagaaacgccccttcatgtgtgcttacccaggctgcaataagagatattttaagctgtcccacttacagatgcacagcaggaagcacactggtgagaaaccataccagtgtgacttcaaggactgtgaacgaaggttttctcgttcagaccagctcaaaagacaccaaaggagacatacaggtgtgaaaccattccagtgtaaaacttgtcagcgaaagttctcccggtccgaccacctgaagacccacaccaggactcatacaggtgaaaagcccttcagctgtcggtggccaagttgtcagaaaaagtttgcccggtcagatgaattagtccgccatcacaacatgcatcagagaaacatgaccaaactccagctggcgctttgaggggtctccctcggggaccgttcagtgtcccaggcagcacagtgtgtgaactgctttcaagtctgactctccactcctcctcactaaaaaggaaacttcagttgatcttcttcatccaacttccaagacaagataccggtgcttctggaaactaccaggtgtgcctggaagagttggtctctgccctgcctacttttagttgactcacaggccctggagaagcagctaacaatgtctggttagttaaaagcccattgccatttggtgtggattttctactgtaagaagagccatagctgatcatgtccccctgacccttcccttctttttttatgctcgttttcgctggggatggaattattgtaccattttctatcatggaatatttataggccagggcatgtgtatgtgtctgctaatgtaaactttgtcatggtttccatttactaacagcaacagcaagaaataaatcagagagcaaggcatcgggggtgaatcttgtctaacattcccgaggtcagccaggctgctaacctggaaagcaggatgtagttctgccaggcaacttttaaagctcatgcatttcaagcagctgaagaaaaaatcagaactaaccagtacctctgtatagaaatctaaaagaattttaccattcagttaattcaatgtgaacactggcacactgctcttaagaaactatgaagatctgagatttttttgtgtatgtttttgactcttttgagtggtaatcatatgtgtctttatagatgtacatacctccttgcacaaatggaggggaattcattttcatcactgggagtgtccttagtgtataaaaaccatgctggtatatggcttcaagttgtaaaaatgaaagtgactttaaaagaaaataggggatggtccaggatctccactgataagactgtttttaagtaacttaaggacctttgggtctacaagtatatgtgaaaaaaatgagacttactgggtgaggaaatccattgtttaaagatggtcgtgtgtgtgtgtgtgtgtgtgtgtgtgtgtgtgttgtgttgtgttttgttttttaagggagggaatttattatttaccgttgcttgaaattactgtgtaaatatatgtctgataatgatttgctctttgacaactaaaattaggactgtataagtactagatgcatcactgggtgttgatcttacaagatattgatgataacacttaaaattgtaacctgcatttttcactttgctctcaattaaagtctattcaaaag

SEQ ID NO: 201 - DNA, 897 bp, Homo sapiens
  gene (1)..(897): Accession No. NM_000039
agagactgcgagaaggaggtcccccacggcccttcaggatgaaagctgcggtgctgaccttggccgtgctcttcctgacggggagccaggctcggcatttctggcagcaagatgaacccccccagagcccctgggatcgagtgaaggacctggccactgtgtacgtggatgtgctcaaagacagcggcagagactatgtgtcccagtttgaaggctccgccttgggaaaacagctaaacctaaagctccttgacaactgggacagcgtgacctccaccttcagcaagctgcgcgaacagctcggccctgtgacccaggagttctgggataacctggaaaaggagacagagggcctgaggcaggagatgagcaaggatctggaggaggtgaaggccaaggtgcagccctacctggacgacttccagaagaagtggcaggaggagatggagctctaccgccagaaggtggagccgctgcgcgcagagctccaagagggcgcgcgccagaagctgcacgagctgcaagagaagctgagcccactgggcgaggagatgcgcgaccgcgcgcgcgcccatgtggacgcgctgcgcacgcatctggccccctacagcgacgagctgcgccagcgcttggccgcgcgccttgaggctctcaaggagaacggcggcgccagactggccgagtaccacgccaaggccaccgagcatctgagcacgctcagcgagaaggccaagcccgcgctcgaggacctccgccaaggcctgctgcccgtgctggagagcttcaaggtcagcttcctgagcgctctcgaggagtacactaagaagctcaacacccagtgaggcgcccgccgccgccccccttcccggtgctcagaataaacgtttccaaagtggg

SEQ ID NO: 202 - DNA, 6531 bp, Homo sapiens
  gene (1)..(6531): Accession No. NM_001759
gcccagccagcttgcgtcaccgcttcagagcggagaagagcgagcaggggagagcgagaccagttttaaggggaggaccggtgcgagtgaggcagccccgaggctctgctcgcccaccacccaatcctcgcctcccttctgctccaccttctctctctgccctcacctctcccccgaaaaccccctatttagccaaaggaaggaggtcaggggaacgctctcccctccccttccaaaaaacaaaaacagaaaaacccttttccaggccggggaaagcaggagggagaggggccgccgggctggccatggagctgctgtgccacgaggtggacccggtccgcagggccgtgcgggaccgcaacctgctccgagacgaccgcgtcctgcagaacctgctcaccatcgaggagcgctaccttccgcagtgctcctacttcaagtgcgtgcagaaggacatccaaccctacatgcgcagaatggtggccacctggatgctggaggtctgtgaggaacagaagtgcgaagaagaggtcttccctctggccatgaattacctggaccgtttcttggctggggtcccgactccgaagtcccatctgcaactcctgggtgctgtctgcatgttcctggcctccaaactcaaagagaccagcccgctgaccgcggagaagctgtgcatttacaccgacaactccatcaagcctcaggagctgctggagtgggaactggtggtgctggggaagttgaagtggaacctggcagctgtcactcctcatgacttcattgagcacatcttgcgcaagctgccccagcagcgggagaagctgtctctgatccgcaagcatgctcagaccttcattgctctgtgtgccaccgactttaagtttgccatgtacccaccgtcgatgatcgcaactggaagtgtgggagcagccatctgtgggctccagcaggatgaggaagtgagctcgctcacttgtgatgccctgactgagctgctggctaagatcaccaacacagacgtggattgtctcaaagcttgccaggagcagattgaggcggtgctcctcaatagcctgcagcagtaccgtcaggaccaacgtgacggatccaagtcggaggatgaactggaccaagccagcacccctacagacgtgcgggatatcgacctgtgaggatgccagttgggccgaaagagagagacgcgtccataatctggtctcttcttctttctggttgtttttgttctttgtgttttagggtgaaacttaaaaaaaaaattctgcccccacctagatcatatttaaagatcttttagaagtgagagaaaaaggtcctacgaaaacggaataataaaaagcatttggtgcctatttgaagtacagcataagggaatcccttgtatatgcgaacagttattgtttgattatgtaaaagtaatagtaaaatgcttacaggaaaacctgcagagtagttagagaatatgtatgcctgcaatatgggaacaaattagaggagacttttttttttcatgttatgagctagcacatacacccccttgtagtataatttcaaggaactgtgtacgccatttatggcatgattagattgcaaagcaatgaactcaagaaggaattgaaataaggagggacatgatggggaaggagtacaaaacaatctctcaacatgattgaaccatttgggatggagaagcacctttgctctcagccacctgttactaagtcaggagtgtagttggatctctacattaatgtcctcttgctgtctacagtagctgctacctaaaaaaagatgttttattttgccagttggacacaggtgattggctcctgggtttcatgttctgtgacatcctgcttcttcttccaaatgcagttcattgcagacaccaccatattgctatctaatggggaaatgtagctatgggccataaccaaaactcacatgaaacggaggcagatggagaccaagggtgggatccagaatggagtcttttctgttattgtatttaaaagggtaatgtggccttggcatttcttcttagaaaaaaactaatttttggtgctgattggcatgtctggttcacagtttagcattgttataaaccattccattcgaaaagcactttgaaaaattgttcccgagcgatagatgggatggtttatgcaagtcatgctgaatactcctcccctcttctcttttgccccctcccttcctgcccccagtctgggttactcttcgcttctggtatctggcgttctttggtacacagttctggtgttcctaccaggactcaagagacaccccttcctgctgacattcccatcacaacattcctcagacaagcctgtaaactaaaatctgttaccattctgatggcacagaaggatcttaattcccatctctatacttctcctttggacatggaaagaaaagttattgctggtgcaaagatagatggctgaacatcagggtgtggcattttgttcccttttccgtttttttttttttattgttgttgttaattttattgcaaagttgtattcagcgtacttgaatttttcttcctctccacttcttagaggcattcagttagcaaagaggttggagcaacaacttttttttttttttttgcacaattgtaattgacaggtaatgaagctatttgttaaaatatttgcctttttaagtaaaaaagaaaaatcagaacagggctatttgaagaattattttatacacagattctgccttgtttcatagtatgagggttgaagacggaaaacaatctaagggtctctcatttttttaattttgttttgttcagtttggtttttttttttttttgcgctgctaagaagctaaagtcatccatccttattcacgttgacagtacctagctgtaatgtttcacagagtgtgctgctattttataaacatttttataatatattattttactgcttaaattccaagtcctgaagtagatggttgagatatgagttcttcgtactggaaaagcccttccgtagtttgttttcttctggtagcatattcatggttgtttttttttttcttttttggttttttggttttttttttttcctctgatcacattcttcaaagacggagtattctttacctcaggtttactggacaaaatcaataactacaaaaggcaatgattcacgcttttgttttcataatacctcacaaccgtacagtttctgcttgggagcccattcgcatgaggaatacagaagcagtgtgagcagggctgactccctctcaggtggaaggcagggcggtctcactcccagggacctttttggtcatggaggccatcgggctcccagttagaccctggtatcctcatcatgatggaaaaaatacattgaaccaagggatcctccctccccttcaaggcagacgttcagtacaaacatttatgcggtaggctcagatgtcgtaatttgcacttaggtaccaggtgtcaggaaacagactaaaaagaattccaccaggctgtttggagatcctcatcttggagctttttcaaaagcggggcttcatctgcaaagggccctttcatcttgaagtttttcccctccgtctttcccctcccctggcatggacaccttgtgtttaggatcatctctgcaggtttcctaggtctgaatctgcgagtagatgaacctgcagcaagcagcgtttatggtgcttccttctccctcctctgtctcaaactgcgcaggcaagcactatgcaagcccaggccctctgctgagcggtactaaacggtcgggttttcaatcacactgaattggcaggataagaaaaataggtcagataagtatgggatgatagttgaagggaggtgaagaggctgcttctctacagaggtgaaattccagatgagtcagtctcttgggaagtgtgtttagaagggttcaggactttgtgagttagcatgaccctaaaattctaggggatttctggtgggacaatgggtggtgaattctgaagttttggagagggaagtggagcagccagcaagtaagctagccagagttttctcaagagccagctttgctcagcacactctcctgggccccaaggagtcccacggaatggggaaagcgggaaccctggagttcttgggaatcttggagcctaaagagaaaccgaggtgcaaattcatttcatggtgactgacccttgagcttaaacagaagcagcaaatgaaagaaccggacaaataaggaagggcacaagcctacccgactctatttacagtctgtaactttccactcttcctgtagtcccgaggcccctgggtccttctagcttttctctttcccatccttggggccttgtgtgatgatgggtgtggggctgccgatgggaaagtcgggggttgttaggcttttctgcctgctcctgcttaaacacaagaaggaatcctggattttgccctctccttagctcttagtctctttggtaggagttttgttccagaggagctctcccccttggatttgaacttgctctttttgttgttgttgttctttctcttctttttcttacctcccactaaaggggttccaaattatcctggtctttttctaccttgttgtgtttctatctcgtctttacttccatctgtttgtttttttctccatcagtgggggccgagttgttcccccagcctgccaaattttgatccttcccctcttttggccaaatcctagggggaagaaatcctagtatgccaaaaatatatgctaagcataattaaactccatgcgggtccataacagccaagaagcctgcaggagaaagccaagggcagttccctccgcagaacaccccatgcgtgctgagaggcgagctccttgaagaaggggctgttcttccaggaggccttattttgaactgcctcaggaccccactggagagcacagcatgccttactactgggtcatccttggtctatgtgctctgtactggaggctctgttctgcctcttatcagccaggtcaggggcacacatggcttaagtgacaaagccagaggagaagacaaccctgacagcatcacgctgcatcccattgctagcaggattggcaactcttcagacggagctgcgcttccctgcagtctagcacctctagggcctctccagactgtgccctgggagctctgggactgaaaggttaagaacataaggcaggatcagatgactctctccaagagggcaggggaattttctctccatgggccacaggggacagggctgggagaagaaatagacttgcaccttatgtcatgtaaataattgattttctagttcaagaagataatattggtagtgtgggaattggaggtaggaaggggaggaagtctgagtaagccagttggcttctaagccaaaaggattcctctttgtttatctctgagacagtccaaccttgagaatagctttaaaagggaaattaatgctgagatgataaagtccccttaagccaacaaaccctctgtagctatagaatgagtgcaggtttctattggtgtggactcagagcaatttacaagagctgttcatgcagccatccatttgtgcaaaatagggtaagaagattcaagaggatatttattacttcctcataccacatggcttttgatgattctggattctaaacaacccagaatggtcatttcaggcacaacgatactacattcgtgtgtgtctgcttttaaacttggctgggctatcagaccctattctcggctcaggttttgagaagccatcagcaaatgtgtacgtgcatgctgtagctgcagcctgcatcccttcgcctgcagcctactttggggaaataaagtgccttactgactgtagccattacagtatccaatgtcttttgacaggtgcctgtccttgaaaaacaaagtttctatttttatttttaattggtttagttcttaactgctggccaactcttacatccccagcaaatcatcgggccattggattttttccattatgttcatcacccttatatcatgtacctcagatctctctctctctcctctctctcagttatgtagtttcttgtcttggacttttttttttcttttctttttctttttttttttgctttaaaacaagtgtgatgccatatcaagtccatgttattctctcacagtgtactctataagaggtgtgggtgtctgtttggtcaggatgttagaaagtgctgataagtagcatgatcagtgtatgcgaaaaggtttttaggaagtatggcaaaaatgttgtattggctatgatggtgacatgatatagtcagctgccttttaagaggtcttatctgttcagtgttaagtgatttaaaaaaataataacctgttttctgactagtttaaagatggatttgaaaatggttttgaatgcaattaggttatgctatttggacaataaactcaccttgacctaaattaaaaaaaaaa

SEQ ID NO: 203 - DNA, 1416 bp, Homo sapiens
  gene (1)..(1416): Accession No. NM_001800
ggagggagggtgagttagggggagacccggcccccaaggggcgggcgccgggcagggccccgcgggcggccgagggttgggcccggctcccagcccctcgccgtcctccggctgacagggggaggagcccgccgggagggccggggtctcgggctggggagccgggacgggagagcagcgcagccgggtgcaccgcggccgcgccccgggagggctgttcgggccagcgcccgccggctgctccgcgctgacagcgccgggctggggcggggcggggggctttgcaggccgccagtgtcgacatgctgctggaggaggttcgcgccggcgaccggctgagtggggcggcggcccggggcgacgtgcaggaggtgcgccgccttctgcaccgcgagctggtgcatcccgacgccctcaaccgcttcggcaagacggcgctgcaggtcatgatgtttggcagcaccgccatcgccctggagctgctgaagcaaggtgccagccccaatgtccaggacacctccggtaccagtccagtccatgacgcagcccgcactggattcctggacaccctgaaggtcctagtggagcacggggctgatgtcaacgtgcctgatggcaccggggcacttccaatccatctggcagttcaagagggtcacactgctgtggtcagctttctggcagctgaatctgatctccatcgcagggacgccaggggtctcacacccttggagctggcactgcagagaggggctcaggacctcgtggacatcctgcagggccacatggtggccccgctgtgatctggggtcaccctctccagcaagagaaccccgtggggttatgtatcagaagagaggggaagaaacactttctcttcttgtttctcctgcccactgctgcagtaggggaggagcacagtttgtggcttataggtgttggttttgggggtgtgagtgtttgggggacgtttctcatttgtttttctcactccttttggtgtgttggacagagaagggctcctgcaggccacagccacctaaacggttcagtttcttctgcgcctcaggctgctggggcctcagacgagacccaagggcagagcatttaagagtgaagtcatgacctccagggagcctagaagctggtggccttggccggctgtgctcagagacctgaagtgtgcacgttgcttcaggcatggggggtggggggagcgtcccaaatcaataagaaggtagaatgagttatgagttattcatattctgttggaagcttgttttccagtctcttgtacagcgttttaaaagaaatggattctatttattatgctttattggaaaaaatgttgtaataatttaatgtttttacccattaaattaagacttgtgcatgatcaaaaaaaaaaaaaaaaaa

SEQ ID NO: 204 - DNA, 1837 bp, Homo sapiens
  gene (1)..(1837): Accession No. NM_005194
gagccgcgcacgggactgggaaggggacccacccgagggtccagccaccagccccctcactaatagcggccaccccggcagcggcggcagcagcagcagcgacgcagcggcgacagctcagagcagggaggccgcgccacctgcgggccggccggagcgggcagccccaggccccctccccgggcacccgcgttcatgcaacgcctggtggcctgggacccagcatgtctccccctgccgccgccgccgcctgcctttaaatccatggaagtggccaacttctactacgaggcggactgcttggctgctgcgtacggcggcaaggcggcccccgcggcgccccccgcggccagacccgggccgcgcccccccgccggcgagctgggcagcatcggcgaccacgagcgcgccatcgacttcagcccgtacctggagccgctgggcgcgccgcaggccccggcgcccgccacggccacggacaccttcgaggcggctccgcccgcgcccgcccccgcgcccgcctcctccgggcagcaccacgacttcctctccgacctcttctccgacgactacgggggcaagaactgcaagaagccggccgagtacggctacgtgagcctggggcgcctgggggccgccaagggcgcgctgcaccccggctgcttcgcgcccctgcacccaccgcccccgccgccgccgccgcccgccgagctcaaggcggagccgggcttcgagcccgcggactgcaagcggaaggaggaggccggggcgccgggcggcggcgcaggcatggcggcgggcttcccgtacgcgctgcgcgcttacctcggctaccaggcggtgccgagcggcagcagcgggagcctctccacgtcctcctcgtccagcccgcccggcacgccgagccccgctgacgccaaggcgcccccgaccgcctgctacgcgggggccgcgccggcgccctcgcaggtcaagagcaaggccaagaagaccgtggacaagcacagcgacgagtacaagatccggcgcgagcgcaacaacatcgccgtgcgcaagagccgcgacaaggccaagatgcgcaacctggagacgcagcacaaggtcctggagctcacggccgagaacgagcggctgcagaagaaggtggagcagctgtcgcgcgagctcagcaccctgcggaacttgttcaagcagctgcccgagcccctgctcgcctcctccggccactgctagcgcggcccccgcgcgcgtccccctgccggccggggctgagactccggggagcgcccgcgcccgcgccctcgcccccgcccccggcggcgccggcaaaactttggcactggggcacttggcagcgcggggagcccgtcggtaattttaatattttattatatatatatatctatatttttgtccaaaccaaccgcacatgcagatggggctcccgcccgtggtgttatttaaagaagaaacgtctatgtgtacagatgaatgataaactctctgcttctccctctgcccctctccaggcgccggcgggcgggccggtttcgaagttgatgcaatcggtttaaacatggctgaacgcgtgtgtacacgggactgacgcaacccacgtgtaactgtcagccgggccctgagtaatcgcttaaagatgttcctacgggcttgttgctgttgatgttttgttttgttttgttttttggtctttttttgtattataaaaaataatctatttctatgagaaaagaggcgtctgtatattttgggaatcttttccgtttcaagcattaagaacacttttaataaacttttttttgagaatggttacaaagcc

SEQ ID NO: 205 - DNA, 10197 bp, Homo sapiens
  gene (1)..(10197): Accession No. NM_004380
ctgcggggcgctgttgctgtggctgagatttggccgccgcctcccccacccggcctgcgccctccctctccctcggcgcccgcccgcccgctcgcggcccgcgctcgctcctctccctcgcagccggcagggcccccgacccccgtccgggccctcgccggcccggccgcccgtgcccggggctgttttcgcgagcaggtgaaaatggctgagaacttgctggacggaccgcccaaccccaaaagagccaaactcagctcgcccggtttctcggcgaatgacagcacagattttggatcattgtttgacttggaaaatgatcttcctgatgagctgatacccaatggaggagaattaggccttttaaacagtgggaaccttgttccagatgctgcttccaaacataaacaactgtcggagcttctacgaggaggcagcggctctagtatcaacccaggaataggaaatgtgagcgccagcagccccgtgcagcagggcctgggtggccaggctcaagggcagccgaacagtgctaacatggccagcctcagtgccatgggcaagagccctctgagccagggagattcttcagcccccagcctgcctaaacaggcagccagcacctctgggcccacccccgctgcctcccaagcactgaatccgcaagcacaaaagcaagtggggctggcgactagcagccctgccacgtcacagactggacctggtatctgcatgaatgctaactttaaccagacccacccaggcctcctcaatagtaactctggccatagcttaattaatcaggcttcacaagggcaggcgcaagtcatgaatggatctcttggggctgctggcagaggaaggggagctggaatgccgtaccctactccagccatgcagggcgcctcgagcagcgtgctggctgagaccctaacgcaggtttccccgcaaatgactggtcacgcgggactgaacaccgcacaggcaggaggcatggccaagatgggaataactgggaacacaagtccatttggacagccctttagtcaagctggagggcagccaatgggagccactggagtgaacccccagttagccagcaaacagagcatggtcaacagtttgcccaccttccctacagatatcaagaatacttcagtcaccaacgtgccaaatatgtctcagatgcaaacatcagtgggaattgtacccacacaagcaattgcaacaggccccactgcagatcctgaaaaacgcaaactgatacagcagcagctggttctactgcttcatgctcataagtgtcagagacgagagcaagcaaacggagaggttcgggcctgctcgctcccgcattgtcgaaccatgaaaaacgttttgaatcacatgacgcattgtcaggctgggaaagcctgccaagttgcccattgtgcatcttcacgacaaatcatctctcattggaagaactgcacacgacatgactgtcctgtttgcctccctttgaaaaatgccagtgacaagcgaaaccaacaaaccatcctggggtctccagctagtggaattcaaaacacaattggttctgttggcacagggcaacagaatgccacttctttaagtaacccaaatcccatagaccccagctccatgcagcgagcctatgctgctctcggactcccctacatgaaccagccccagacgcagctgcagcctcaggttcctggccagcaaccagcacagcctcaaacccaccagcagatgaggactctcaaccccctgggaaataatccaatgaacattccagcaggaggaataacaacagatcagcagcccccaaacttgatttcagaatcagctcttccgacttccctgggggccacaaacccactgatgaacgatggctccaactctggtaacattggaaccctcagcactataccaacagcagctcctccttctagcaccggtgtaaggaaaggctggcacgaacatgtcactcaggacctgcggagccatctagtgcataaactcgtccaagccatcttcccaacacctgatcccgcagctctaaaggatcgccgcatggaaaacctggtagcctatgctaagaaagtggaaggggacatgtacgagtctgccaacagcagggatgaatattatcacttattagcagagaaaatctacaagatacaaaaagaactagaagaaaaacggaggtcgcgtttacataaacaaggcatcttggggaaccagccagccttaccagccccgggggctcagccccctgtgattccacaggcacaacctgtgagacctccaaatggacccctgtccctgccagtgaatcgcatgcaagtttctcaagggatgaattcatttaaccccatgtccttggggaacgtccagttgccacaagcacccatgggacctcgtgcagcctccccaatgaaccactctgtccagatgaacagcatgggctcagtgccagggatggccatttctccttcccgaatgcctcagcctccgaacatgatgggtgcacacaccaacaacatgatggcccaggcgcccgctcagagccagtttctgccacagaaccagttcccgtcatccagcggggcgatgagtgtgggcatggggcagccgccagcccaaacaggcgtgtcacagggacaggtgcctggtgctgctcttcctaaccctctcaacatgctggggcctcaggccagccagctaccttgccctccagtgacacagtcaccactgcacccaacaccgcctcctgcttccacggctgctggcatgccatctctccagcacacgacaccacctgggatgactcctccccagccagcagctcccactcagccatcaactcctgtgtcgtcttccgggcagactcccaccccgactcctggctcagtgcccagtgctacccaaacccagagcacccctacagtccaggcagcagcccaggcccaggtgaccccgcagcctcaaaccccagttcagcccccgtctgtggctacccctcagtcatcgcagcaacagccgacgcctgtgcacgcccagcctcctggcacaccgctttcccaggcagcagccagcattgataacagagtccctaccccctcctcggtggccagcgcagaaaccaattcccagcagccaggacctgacgtacctgtgctggaaatgaagacggagacccaagcagaggacactgagcccgatcctggtgaatccaaaggggagcccaggtctgagatgatggaggaggatttgcaaggagcttcccaagttaaagaagaaacagacatagcagagcagaaatcagaaccaatggaagtggatgaaaagaaacctgaagtgaaagtagaagttaaagaggaagaagagagtagcagtaacggcacagcctctcagtcaacatctccttcgcagccgcgcaaaaaaatctttaaaccagaggagttacgccaggccctcatgccaaccctagaagcactgtatcgacaggacccagagtcattacctttccggcagcctgtagatccccagctcctcggaattccagactattttgacatcgtaaagaatcccatggacctctccaccatcaagcggaagctggacacagggcaataccaagagccctggcagtacgtggacgacgtctggctcatgttcaacaatgcctggctctataatcgcaagacatcccgagtctataagttttgcagtaagcttgcagaggtctttgagcaggaaattgaccctgtcatgcagtcccttggatattgctgtggacgcaagtatgagttttccccacagactttgtgctgctatgggaagcagctgtgtaccattcctcgcgatgctgcctactacagctatcagaataggtatcatttctgtgagaagtgtttcacagagatccagggcgagaatgtgaccctgggtgacgacccttcacagccccagacgacaatttcaaaggatcagtttgaaaagaagaaaaatgataccttagaccccgaacctttcgttgattgcaaggagtgtggccggaagatgcatcagatttgcgttctgcactatgacatcatttggccttcaggttttgtgtgcgacaactgcttgaagaaaactggcagacctcgaaaagaaaacaaattcagtgctaagaggctgcagaccacaagactgggaaaccacttggaagaccgagtgaacaaatttttgcggcgccagaatcaccctgaagccggggaggtttttgtccgagtggtggccagctcagacaagacggtggaggtcaagcccgggatgaagtcacggtttgtggattctggggaaatgtctgaatctttcccatatcgaaccaaagctctgtttgcttttgaggaaattgacggcgtggatgtctgcttttttggaatgcacgtccaagaatacggctctgattgcccccctccaaacacgaggcgtgtgtacatttcttatctggatagtattcatttcttccggccacgttgcctccgcacagccgtttaccatgagatccttattggatatttagagtatgtgaagaaattagggtatgtgacagggcacatctgggcctgtcctccaagtgaaggagatgattacatcttccattgccacccacctgatcaaaaaatacccaagccaaaacgactgcaggagtggtacaaaaagatgctggacaaggcgtttgcagagcggatcatccatgactacaaggatattttcaaacaagcaactgaagacaggctcaccagtgccaaggaactgccctattttgaaggtgatttctggcccaatgtgttagaagagagcattaaggaactagaacaagaagaagaggagaggaaaaaggaagagagcactgcagccagtgaaaccactgagggcagtcagggcgacagcaagaatgccaagaagaagaacaacaagaaaaccaacaagaacaaaagcagcatcagccgcgccaacaagaagaagcccagcatgcccaacgtgtccaatgacctgtcccagaagctgtatgccaccatggagaagcacaaggaggtcttcttcgtgatccacctgcacgctgggcctgtcatcaacaccctgccccccatcgtcgaccccgaccccctgctcagctgtgacctcatggatgggcgcgacgccttcctcaccctcgccagagacaagcactgggagttctcctccttgcgccgctccaagtggtccacgctctgcatgctggtggagctgcacacccagggccaggaccgctttgtctacacctgcaacgagtgcaagcaccacgtggagacgcgctggcactgcactgtgtgcgaggactacgacctctgcatcaactgctataacacgaagagccatgcccataagatggtgaagtgggggctgggcctggatgacgagggcagcagccagggcgagccacagtcaaagagcccccaggagtcacgccggctgagcatccagcgctgcatccagtcgctggtgcacgcgtgccagtgccgcaacgccaactgctcgctgccatcctgccagaagatgaagcgggtggtgcagcacaccaagggctgcaaacgcaagaccaacgggggctgcccggtgtgcaagcagctcatcgccctctgctgctaccacgccaagcactgccaagaaaacaaatgccccgtgcccttctgcctcaacatcaaacacaagctccgccagcagcagatccagcaccgcctgcagcaggcccagctcatgcgccggcggatggccaccatgaacacccgcaacgtgcctcagcagagtctgccttctcctacctcagcaccgcccgggacccccacacagcagcccagcacaccccagacgccgcagccccctgcccagccccaaccctcacccgtgagcatgtcaccagctggcttccccagcgtggcccggactcagccccccaccacggtgtccacagggaagcctaccagccaggtgccggcccccccacccccggcccagccccctcctgcagcggtggaagcggctcggcagatcgagcgtgaggcccagcagcagcagcacctgtaccgggtgaacatcaacaacagcatgcccccaggacgcacgggcatggggaccccggggagccagatggcccccgtgagcctgaatgtgccccgacccaaccaggtgagcgggcccgtcatgcccagcatgcctcccgggcagtggcagcaggcgccccttccccagcagcagcccatgccaggcttgcccaggcctgtgatatccatgcaggcccaggcggccgtggctgggccccggatgcccagcgtgcagccacccaggagcatctcacccagcgctctgcaagacctgctgcggaccctgaagtcgcccagctcccctcagcagcaacagcaggtgctgaacattctcaaatcaaacccgcagctaatggcagctttcatcaaacagcgcacagccaagtacgtggccaatcagcccggcatgcagccccagcctggcctccagtcccagcccggcatgcaaccccagcctggcatgcaccagcagcccagcctgcagaacctgaatgccatgcaggctggcgtgccgcggcccggtgtgcctccacagcagcaggcgatgggaggcctgaacccccagggccaggccttgaacatcatgaacccaggacacaaccccaacatggcgagtatgaatccacagtaccgagaaatgttacggaggcagctgctgcagcagcagcagcaacagcagcagcaacaacagcagcaacagcagcagcagcaagggagtgccggcatggctgggggcatggcggggcacggccagttccagcagcctcaaggacccggaggctacccaccggccatgcagcagcagcagcgcatgcagcagcatctccccctccagggcagctccatgggccagatggcggctcagatgggacagcttggccagatggggcagccggggctgggggcagacagcacccccaacatccagcaagccctgcagcagcggattctgcagcaacagcagatgaagcagcagattgggtccccaggccagccgaaccccatgagcccccagcaacacatgctctcaggacagccacaggcctcgcatctccctggccagcagatcgccacgtcccttagtaaccaggtgcggtctccagcccctgtccagtctccacggccccagtcccagcctccacattccagcccgtcaccacggatacagccccagccttcgccacaccacgtctcaccccagactggttccccccaccccggactcgcagtcaccatggccagctccatagatcagggacacttggggaaccccgaacagagtgcaatgctcccccagctgaacacccccagcaggagtgcgctgtccagcgaactgtccctggtcggggacaccacgggggacacgctagagaagtttgtggagggcttgtagcattgtgagagcatcaccttttccctttcatgttcttggaccttttgtactgaaaatccaggcatctaggttctttttattcctagatggaactgcgacttccgagccatggaagggtggattgatgtttaaagaaacaatacaaagaatatatttttttgttaaaaaccagttgatttaaatatctggtctctctctttggtttttttttggcgggggggtggggggggttcttttttttccgttttgtttttgtttggggggaggggggttttgtttggattctttttgtcgtcattgctggtgactcatgcctttttttaacgggaaaaacaagttcattatattcatattttttatttgtattttcaagactttaaacatttatgtttaaaagtaagaagaaaaataatattcagaactgattcctgaaataatgcaagcttataatgtatcccgataactttgtgatgtttcgggaagatttttttctatagtgaactctgtgggcgtctcccagtattaccctggatgataggaattgactccggcgtgcacacacgtacacacccacacacatctatctatacataatggctgaagccaaacttgtcttgcagatgtagaaattgttgctttgtttctctgataaaactggttttagacaaaaaatagggatgatcactcttagaccatgctaatgttactagagaagaagccttcttttctttcttctatgtgaaacttgaaatgaggaaaagcaattctagtgtaaatcatgcaagcgctctaattcctataaatacgaaactcgagaagattcaatcactgtatagaatggtaaaataccaactcatttcttatatcatattgttaaataaactgtgtgcaacagacaaaaagggtggtccttcttgaattcatgtacatggtattaacacttagtgttcggggttttttgttatgaaaatgctgttttcaacattgtatttggactatgcatgtgttttttccccattgtatataaagtaccgcttaaaattgatataaattactgaggtttttaacatgtattctgttctttaagatccctgtaagaatgtttaaggtttttatttatttatatatattttttgagtctgttctttgtaagacatggttctggttgttcgctcatagcggagaggctggggctgcggttgtggttgtggcggcgtgggtggtggctgggaactgtggcccaggcttagcggccgcccggaggcttttcttcccggagactgaggtgggcgactgaggtgggcggctcagcgttggccccacacattcgaggctcacaggtgattgtcgctcacacagttagggtcgtcagttggtctgaaactgcatttggcccactcctccatcctccctgtccgtcgtagctgccacccccagaggcggcgcttcttcccgtgttcaggcggctccccccccccgtacacgactcccagaatctgaggcagagagtgctccaggctcgcgaggtgctttctgacttccccccaaatcctgccgctgccgcgcagcatgtcccgtgtggcgtttgaggaaatgctgagggacagacaccttggagcaccagctccggtccctgttacagtgagaaaggtcccccacttcgggggatacttgcacttagccacatggtcctgcctcccttggagtccagttccaggctcccttactgagtgggtgagacaagttcacaaaaaccgtaaaactgagaggaggaccatgggcaggggagctgaagttcatcccctaagtctaccacccccagcacccagagaacccactttatccctagtcccccaacaaaggctggtctaggtgggggtgatggtaattttagaaatcacgccccaaatagcttccgtttgggcccttacattcacagataggttttaaatagctgaatacttggtttgggaatctgaattcgaggaacctttctaagaagttggaaaggtccgatctagttttagcacagagctttgaaccttgagttataaaatgcagaataattcaagtaaaaataagaccaccatctggcacccctgaccagcccccattcaccccatcccaggaggggaagcacaggccgggcctccggtggagattgctgccactgctcggcctgctgggttcttaacctccagtgtcctcttcatcttttccacccgtagggaaaccttgagccatgtgttcaaacaagaagtggggctagagcccgagagcagcagctctaagcccacactcagaaagtggcgccctcctggttgtgcagccttttaatgtgggcagtggaggggcctctgtttcaggttatcctggaattcaaaacgttatgtaccaacctcatcctctttggagtctgcatcctgtgcaaccgtcttgggcaatccagatgtcgaaggatgtgaccgagagcatggtctgtggatgctaaccctaagtttgtcgtaaggaaatttctgtaagaaacctggaaagccccaacgctgtgtctcatgctgtatacttaagaggagaagaaaaagtcctatatttgtgatcaaaaagaggaaacttgaaatgtgatggtgtttataataaaagatggtaaaactacttggattcaaa

SEQ ID NO: 206 - DNA, 2992 bp, Homo sapiens
  gene (1)..(2992): Accession No. NM_000399
aactgagcgaggagcaattgattaatagctcggcgaggggactcactgactgttataataacactacaccagcaactcctggcttcccagcagccggaacacagacaggagagagtcagtggcaaatagacatttttcttatttcttaaaaaacagcaacttgtttgctacttttatttctgttgatttttttttcttggtgtgtgtggtggttgtttttaagtgtggagggcaaaaggagataccatcccaggctcagtccaacccctctccaaaacggcttttctgacactccaggtagcgagggagttgggtctccaggttgtgcgaggagcaaatgatgaccgccaaggccgtagacaaaatcccagtaactctcagtggttttgtgcaccagctgtctgacaacatctacccggtggaggacctcgccgccacgtcggtgaccatctttcccaatgccgaactgggaggcccctttgaccagatgaacggagtggccggagatggcatgatcaacattgacatgactggagagaagaggtcgttggatctcccatatcccagcagctttgctcccgtctctgcacctagaaaccagaccttcacttacatgggcaagttctccattgaccctcagtaccctggtgccagctgctacccagaaggcataatcaatattgtgagtgcaggcatcttgcaaggggtcacttccccagcttcaaccacagcctcatccagcgtcacctctgcctcccccaacccactggccacaggacccctgggtgtgtgcaccatgtcccagacccagcctgacctggaccacctgtactctccgccaccgcctcctcctccttattctggctgtgcaggagacctctaccaggacccttctgcgttcctgtcagcagccaccacctccacctcttcctctctggcctacccaccacctccttcctatccatcccccaagccagccacggacccaggtctcttcccaatgatcccagactatcctggattctttccatctcagtgccagagagacctacatggtacagctggcccagaccgtaagccctttccctgcccactggacaccctgcgggtgccccctccactcactccactctctacaatccgtaactttaccctggggggccccagtgctggggtgaccggaccaggggccagtggaggcagcgagggaccccggctgcctggtagcagctcagcagcagcagcagccgccgccgccgccgcctataacccacaccacctgccactgcggcccattctgaggcctcgcaagtaccccaacagacccagcaagacgccggtgcacgagaggccctacccgtgcccagcagaaggctgcgaccggcggttctcccgctctgacgagctgacacggcacatccgaatccacactgggcataagcccttccagtgtcggatctgcatgcgcaacttcagccgcagtgaccacctcaccacccatatccgcacccacaccggtgagaagcccttcgcctgtgactactgtggccgaaagtttgcccggagtgatgagaggaagcgccacaccaagatccacctgagacagaaagagcggaaaagcagtgccccctctgcatcggtgccagccccctctacagcctcctgctctgggggcgtgcagcctgggggtaccctgtgcagcagtaacagcagcagtcttggcggagggccgctcgccccttgctcctctcggacccggacaccttgagatgagactcaggctgatacaccagctcccaaaggtcccggaggccctttgtccactggagctgcacaacaaacactaccaccctttcctgtccctctctccctttgttgggcaaagggctttggtggagctagcactgccccctttccacctagaagcaggttcttcctaaaacttagcccattctagtctctcttaggtgagttgactatcaacccaaggcaaaggggaggctcagaaggaggtggtgtggggacccctggccaagagggctgaggtctgaccctgctttaaagggttgtttgactaggttttgctaccccacttccccttattttgacccatcacaggtttttgaccctggatgtcagagttgatctaagacgttttctacaataggttgggagatgctgatcccttcaagtggggacagcaaaaagacaagcaaaactgatgtgcactttatggcttgggactgatttgggggacattgtacagtgagtgaagtatagcctttatgccacactctgtggccctaaaatggtgaatcagagcatatctagttgtctcaacccttgaagcaatatgtattataaactcagagaacagaagtgcaatgtgatgggaggaacatagcaatatctgctccttttcgagttgtttgagaaatgtaggctattttttcagtgtatatccactcagattttgtgtatttttgatgtacactgttctctaaattctgaatctttgggaaaaaatgtaaagcatttatgatctcagaggttaacttatttaagggggatgtacatatattctctgaaactaggatgcatgcaattgtgttggaagtgtccttggtgccttgtgtgatgtagacaatgttacaaggtctgcatgtaaatgggttgccttattatggagaaaaaaatcactccctgagtttagtatggctgtatatttctgcctattaatatttggaattttttttagaaagtatatttttgtatgctttgttttgtgacttaaaagtgttacctttgtagtcaaatttcagataagaatgtacataatgttaccggagctgatttgtttggtcattagctcttaatagttgtgaaaaaataaatctattctaacgcaaaaccactaactgaagttcagataatggatggtttgtgactatagtgtaaataaatacttttcaacaataaaaaaaaaaaaaaa

SEQ ID NO: 207 - DNA, 4342 bp, Homo sapiens
  gene (1)..(4342): Accession No. NM_004430
gatcaatactgaggccgcgtccgacccccttgagccgagatccccccccagcccagcccccaccccaccccccgcacacgccccaccccccccacgacccagcctcataccgcaccagctgaggcacccaagaggattaccccctggggccctctcccgccccccaaaaaagagaagatcccctctcctggcccatcccttcccttcttccctcccccctccccccgaactttccctctcgcatgcttttcccctgcaccacggatcgcctctcggatgccgcttgcctggaagctgcgttaggagcgagcggcggcggtggcggcggtggcggcggcggcggcagctcgggagtgctatgaccggcaaactcgccgagaagctgccggtgaccatgagcagtttgctaaaccaactgcctgacaatctgtaccccgaggagatccccagcgcgctcaacctcttctccggcagcagcgactcggtagtccattacaatcagatggctacagagaatgtaatggacatcggtctgaccaacgagaagcccaacccggaactctcttactccggctccttccagccagcccccggcaacaagaccgtgacctacttgggaaagttcgccttcgactccccttccaactggtgccaggacaacatcattagcctcatgagcgccggcatcttgggggtgcccccggcttcaggggcgctcagcacgcagacgtccacggccagcatggtgcagccaccgcagggtgacgtggaggccatgtatcccgcgctacccccctactccaactgcggcgacctctactcagagcccgtgtctttccacgacccccagggcaatcccgggctcgcctattccccccaggattaccaatcggccaagccggcgttggacagcaatctcttccccatgattcctgactacaacctctaccaccaccccaacgacatgggctccattccggagcacaagcccttccagggcatggaccccatccgggtcaacccgccccctattacccctctggagaccatcaaggcattcaaagacaagcagatccacccgggctttggcagcctgccccagccgccgctcaccctcaagcccatccggccccgcaagtaccccaaccggcctagcaagacaccgctccacgaacggccccacgcgtgcccggccgagggctgcgaccgccgtttcagccgttcggacgagctgacccggcacctgcgcatccacacgggccacaagcccttccagtgccggatctgcatgcggagcttcagccgcagcgaccacctcaccactcacatccgcactcatacgggcgagaagccctttgcctgcgagttctgcgggcgcaagtttgcgcgcagcgacgagcgcaagcgccacgccaagatccacctcaagcaaaaggagaagaaggcggagaagggcggtgcaccctctgcatcctcggcgccccccgtgtcgctggcccccgtggtcaccacctgcgcctgaggatcgggcccccagatccccacttttcccctccagtgcctcccggctgctagcctgaaagcagcgggaaagccagccacggaggcgtaggggccgcgccctggcctctccatggacgtgcggccccttgcttccccttcgatgcccccggttcccaacctttcacgccggccagcggtcaggggccagggctggaggcgccttcccctcgcggtcccccacttagccaaggcgtgggggcggaaaggtggcgtctagcccgctttgttcagttcggatcgccttgatccaggggccgccgggccgcgccaaggacctgcaagggactgaaggcggagcccatccaaccctcgcccgacccaaacacctcattgtttcccccacgtctccctctataccccctcgaagactcgagagggggagggggtaaggagcgcaccaaagcgcagagcttgctgcccgccgcacgcacgcgcgcctgcgtgcggggatgcgcgcgagtgtgtgcgtgctcgcgtgtgtgtgtatgtgtgtgtgtgagtgtgtgtgtgtgcgcgcgcgcaagcgtgtgtgtttaagactcttgagctgaactgggctgtgtttaccccaaactcttccccacctcgggtccccaagccgctgggagatgtcccatgctgggggtccgcacgtggctggaggaggtggtcttccatccgctctgaaatcatgtttcttagagaaatgcctcggatgccgccgacgcggtgctgctgccgccgcttcgggtttggcccctcagaacccctccttttctgagcgcttccctcttaggcctcagggcagtttgatctgtggggagaaagagcagccatcgctgagcctgccttttaaaatatatgtgtatttccttagccccactctaagaaatctatgttcctgagtttgccccctgccctcccactccttccccttctcccctctaaaccttctcccatctctttcaaaatcttttcccagaaaggcaggcttcaaccagccactccagctttgtgtcttctctcaattacatagcaatttctccttcccaccatcatggggaagctggctctgcttttgccctttgtcatcaccaacacaacagatagaatttaaatataagtatatggtgtgcgtgtgtatgtatgtgtatgtatatgcatgcatgtgtataaagatgcacatgcgtacatatacataacatacacacaatatgtattcctagcaaaataaaatctctaaggtacttggttatccagtgcagtgcaccggaataaagagaatttgtaggcgtatacagctttaaatgatttattttttatgaaaatgttaactgatgagattatatctacatacgtgtgttatgtgtgtggatatagatgcacacatatctgtacatatacatgtgagtgtacatatatacacatatacacatctatgtatggatatgtgtgtatacacatatacacatctctgtccaaaatttcctcaaagatatggggattttttcatgaatccatgtggatgaatgaggtgtctcctttccatacccagtctcaccttctccccaccctacctcacctcttctcaggcacccctcttccccagctgtcctgccagcccttctcgtacagggtggctcctttgaagtggagtaatagggaaggttgctctctgccacagcttgcagcatggtcttgactgaatgtactgttcctgttagcgttacttctcctgtggtcagtaagttgcccagagagaaggaacaaaggtctggagtttacagaatgtctgtttttaaagtcactttatgcgttttccacttttttcttttttaagaaaaagaagtaccatttttgttttgttttgttttgatttttggtggtggataaataatactaaaaggactctagtggaaaggggggatatcgaagagcagggggttgtgaatttccaggtacttggactttttgtagaaggagagagaagaagatgaagtttgccaggagggcccatattttttcagctgaagggtaaaatctttctttgcagagacagtattttgctgaatactttttataatgtgatgattattaaaaaagcaaaaattttggtcacttccaagctagaaggaggaatcagataccctttaatattttttcctcgctccttctggtatatgcatgtcactgcatgataattgagttttcctttgttttaataaaactgttctcagacattaagctaaactaagagaaaaataactttgttgccaaaaggttgtgctatccagattttttatatgtctgcatgtttaaaaaaaaaaagcaacaaaagaaaatgcactctaacttatgtgaactgagagaaaaaaatcaggttttaaacaggaaaacctatggggaatgatattttttgaaagacttttgtataaagttgagtacttagaaaaaagacaaaccagatgtaatatattttgtggatgtttttatttcttggatttatagtaccttatactaaggttaaaaaaatatgcttgatattgtgaaaaggtgaaattcttcaccaacatttcatttgctcctttgtcatattgtaatgccaatataatatagttaatgaaaacagcatttttaaaaaccgaaatattgaaatggtgtaatgttgtaccatttgcactgtgagcaaatgctaatacagtaaatatattgtgtttgctgacaatcagccggcctataaatctccttattttatttcttgtttttatagcataaagctttagtttggcctgaaaaaaaa

SEQ ID NO: 208 - DNA, 2379 bp, Homo sapiens
  gene (1)..(2379): Accession No. NM_001965
cgggagtccccggcacacatcctgtgtccatgtttgggcatttacgtcacggcggcagggccggggcctcccaaaatggcagtggcccggggagtcggaagcccggagccagcgccgccgcagctatataagtgggggggctgtgggctgggggagcccggcagcgctttggagaggcgaggagccgccgcccgaggccggtgcgggcgagcgagggcgccgcggctccccgactcctttcccagaggtgagtgcccgaagccaggagcccgggcgcctaggtctgtgcgctgcggggaacccctaccgccagcctccccgccacccgcgcgcccccaagcccagcgggcgaggccccgggcgccccacagccggcgccgcgccatgctccaccttagcgagttttccgaacccgacgcgctcctcgtcaagtccactgaaggctgttgcgccgaacccagcgctgaattgccccggctgcctgccagggacgctcccgcggccaccggctaccctggagcaggcgacttcttgagctgggctttgaacagctgcggcgcaagtggggacttagccgactcctgcttcctggaggggcctgcgcccacaccccctcccggcctcagctacagcggtagcttcttcattcaggcagtgcccgaacacccgcacgacccggaggcactcttcaacctcatgtcgggcatcttaggcctggcacccttccccggtccagaggcagcagcgtccagatccccgctggatgccccttttcctgcggggtccgatgccttgctgccgggtccgccggacctttactccccggatctgggcgctgcccctttcccagaggcgttctgggaggcctcgccttgcgcgggtgccccctcgcagtgcctgtatgagcctcagctctccccgcccgacgtcaagcccggcctccgggcgcctcccgcctcgccagcgctggacgctgtctctgccttcaagggtccctacgcgccctgggagctgctttctgtgggggccccagggaactgtgggtcacagggagactaccaggccgccccggaggctcgttttcccgtaatagggaccaagattgaggacttgctgtccatcagctgccctgcggaactgccggccgtcccagccaacagactctatcccagcggggcctatgacgctttcccgctggccccgggtgacttaggggagggggctgagggcctccctgggctcctgacccctcctagtggggagggagggagtagcggcgacggcggagagtttctggccagtacgcagcctcagctttccccgctgggccttcgcagcgccgccgcggcggacttccctaaacctctggtggcggacatccctggaagcagtggcgtggctgcaccacccgtgccgccgccgccgcccacccctttcccccaggccaaggcgcgacgcaaggggcgccgcggcggcaaatgcagcacgcgctgcttctgcccgcggccgcacgccaaggccttcgcttgcccggtggagagttgtgtgcggagctttgcgcgctccgacgagctcaatcgccacctgcgcatccacacgggccacaaacccttccagtgccgcatctgcctccgcaacttcagccgcagcgaccacctcaccacgcacgtgcgcacccacaccggcgagaagccttttgcttgcgacgtgtgcggccgccgcttcgcgcgcagcgatgagaagaaacggcacagcaaggtgcacctcaagcagaaggcgcgcgccgaggagcggctcaagggcctcggcttttactcgctgggcctctccttcgcttctctctgagcaagagatgggtttatgggttggggcgccgccgttcggcgcgcacgagttccgggccgttcccctccccgctcttcttccaactcctcctcgcacgcccgagggccggcctccggtcccgcttccagtttccttgaagcgcccgccgcacacgccctattcagcaccagctccgcggacagttcccgcggtccaggcgctgtcacccttgtcagccgcgctttgggggaagtcttctgagaccacccagtgaataggcactaccctgggattcaagacagtcttttgtaactggcacacgccccacgccttcctctataacccccagagacaggctggggcagcgccaaggcggtctcgcgcgggactttgtacagcagtgtcttatccagcagccattggatgtaacgttttgctttgggttttttttccttttgttgttgttaatttttgtaaagcagacgctactctcaagcagttgacaaaactgtttatttttgcaattaaaattattgtgctaaaagcttaaaaaaa

SEQ ID NO: 209 - DNA, 8761 bp, Homo sapiens
  gene (1)..(8761): Accession No. NM_001429
gccgaggaggaagaggttgatggcggcggcggagctccgagagacctcggctgggcaggggccggccgtggcgggccggggactgcgcctctagagccgcgagttctcgggaattcgccgcagcggacgcgctcggcgaatttgtgctcttgtgccctcctccgggcttgggcccaggcccggcccctcgcacttgcccttaccttttctatcgagtccgcatccctctccagccactgcgacccggcgaagagaaaaaggaacttcccccaccccctcgggtgccgtcggagccccccagcccacccctgggtgcggcgcggggaccccgggccgaagaagagatttcctgaggattctggttttcctcgcttgtatctccgaaagaattaaaaatggccgagaatgtggtggaaccggggccgccttcagccaagcggcctaaactctcatctccggccctctcggcgtccgccagcgatggcacagattttggctctctatttgacttggagcacgacttaccagatgaattaatcaactctacagaattgggactaaccaatggtggtgatattaatcagcttcagacaagtcttggcatggtacaagatgcagcttctaaacataaacagctgtcagaattgctgcgatctggtagttcccctaacctcaatatgggagttggtggcccaggtcaagtcatggccagccaggcccaacagagcagtcctggattaggtttgataaatagcatggtcaaaagcccaatgacacaggcaggcttgacttctcccaacatggggatgggcactagtggaccaaatcagggtcctacgcagtcaacaggtatgatgaacagtccagtaaatcagcctgccatgggaatgaacacagggatgaatgcgggcatgaatcctggaatgttggctgcaggcaatggacaagggataatgcctaatcaagtcatgaacggttcaattggagcaggccgagggcgacagaatatgcagtacccaaacccaggcatgggaagtgctggcaacttactgactgagcctcttcagcagggctctccccagatgggaggacaaacaggattgagaggcccccagcctcttaagatgggaatgatgaacaaccccaatccttatggttcaccatatactcagaatcctggacagcagattggagccagtggccttggtctccagattcagacaaaaactgtactatcaaataacttatctccatttgctatggacaaaaaggcagttcctggtggaggaatgcccaacatgggtcaacagccagccccgcaggtccagcagccaggcctggtgactccagttgcccaagggatgggttctggagcacatacagctgatccagagaagcgcaagctcatccagcagcagcttgttctccttttgcatgctcacaagtgccagcgccgggaacaggccaatggggaagtgaggcagtgcaaccttccccactgtcgcacaatgaagaatgtcctaaaccacatgacacactgccagtcaggcaagtcttgccaagtggcacactgtgcatcttctcgacaaatcatttcacactggaagaattgtacaagacatgattgtcctgtgtgtctccccctcaaaaatgctggtgataagagaaatcaacagccaattttgactggagcacccgttggacttggaaatcctagctctctaggggtgggtcaacagtctgcccccaacctaagcactgttagtcagattgatcccagctccatagaaagagcctatgcagctcttggactaccctatcaagtaaatcagatgccgacacaaccccaggtgcaagcaaagaaccagcagaatcagcagcctgggcagtctccccaaggcatgcggcccatgagcaacatgagtgctagtcctatgggagtaaatggaggtgtaggagttcaaacgccgagtcttctttctgactcaatgttgcattcagccataaattctcaaaacccaatgatgagtgaaaatgccagtgtgccctccctgggtcctatgccaacagcagctcaaccatccactactggaattcggaaacagtggcacgaagatattactcaggatcttcgaaatcatcttgttcacaaactcgtccaagccatatttcctacgccggatcctgctgctttaaaagacagacggatggaaaacctagttgcatatgctcggaaagttgaaggggacatgtatgaatctgcaaacaatcgagcggaatactaccaccttctagctgagaaaatctataagatccagaaagaactagaagaaaaacgaaggaccagactacagaagcagaacatgctaccaaatgctgcaggcatggttccagtttccatgaatccagggcctaacatgggacagccgcaaccaggaatgacttctaatggccctctacctgacccaagtatgatccgtggcagtgtgccaaaccagatgatgcctcgaataactccacaatctggtttgaatcaatttggccagatgagcatggcccagccccctattgtaccccggcaaacccctcctcttcagcaccatggacagttggctcaacctggagctctcaacccgcctatgggctatgggcctcgtatgcaacagccttccaaccagggccagttccttcctcagactcagttcccatcacagggaatgaatgtaacaaatatccctttggctccgtccagcggtcaagctccagtgtctcaagcacaaatgtctagttcttcctgcccggtgaactctcctataatgcctccagggtctcaggggagccacattcactgtccccagcttcctcaaccagctcttcatcagaattcaccctcgcctgtacctagtcgtacccccacccctcaccatactcccccaagcataggggctcagcagccaccagcaacaacaattccagcccctgttcctacacctcctgccatgccacctgggccacagtcccaggctctacatccccctccaaggcagacacctacaccaccaacaacacaacttccccaacaagtgcagccttcacttcctgctgcaccttctgctgaccagccccagcagcagcctcgctcacagcagagcacagcagcgtctgttcctaccccaacagcaccgctgcttcctccgcagcctgcaactccactttcccagccagctgtaagcattgaaggacaggtatcaaatcctccatctactagtagcacagaagtgaattctcaggccattgctgagaagcagccttcccaggaagtgaagatggaggccaaaatggaagtggatcaaccagaaccagcagatactcagccggaggatatttcagagtctaaagtggaagactgtaaaatggaatctaccgaaacagaagagagaagcactgagttaaaaactgaaataaaagaggaggaagaccagccaagtacttcagctacccagtcatctccggctccaggacagtcaaagaaaaagattttcaaaccagaagaactacgacaggcactgatgccaactttggaggcactttaccgtcaggatccagaatcccttccctttcgtcaacctgtggaccctcagcttttaggaatccctgattactttgatattgtgaagagccccatggatctttctaccattaagaggaagttagacactggacagtatcaggagccctggcagtatgtcgatgatatttggcttatgttcaataatgcctggttatataaccggaaaacatcacgggtatacaaatactgctccaagctctctgaggtctttgaacaagaaattgacccagtgatgcaaagccttggatactgttgtggcagaaagttggagttctctccacagacactgtgttgctacggcaaacagttgtgcacaatacctcgtgatgccacttattacagttaccagaacaggtatcatttctgtgagaagtgtttcaatgagatccaaggggagagcgtttctttgggggatgacccttcccagcctcaaactacaataaataaagaacaattttccaagagaaaaaatgacacactggatcctgaactgtttgttgaatgtacagagtgcggaagaaagatgcatcagatctgtgtccttcaccatgagatcatctggcctgctggattcgtctgtgatggctgtttaaagaaaagtgcacgaactaggaaagaaaataagttttctgctaaaaggttgccatctaccagacttggcacctttctagagaatcgtgtgaatgactttctgaggcgacagaatcaccctgagtcaggagaggtcactgttagagtagttcatgcttctgacaaaaccgtggaagtaaaaccaggcatgaaagcaaggtttgtggacagtggagagatggcagaatcctttccataccgaaccaaagccctctttgcctttgaagaaattgatggtgttgacctgtgcttctttggcatgcatgttcaagagtatggctctgactgccctccacccaaccagaggagagtatacatatcttacctcgatagtgttcatttcttccgtcctaaatgcttgaggactgcagtctatcatgaaatcctaattggatatttagaatatgtcaagaaattaggttacacaacagggcatatttgggcatgtccaccaagtgagggagatgattatatcttccattgccatcctcctgaccagaagatacccaagcccaagcgactgcaggaatggtacaaaaaaatgcttgacaaggctgtatcagagcgtattgtccatgactacaaggatatttttaaacaagctactgaagatagattaacaagtgcaaaggaattgccttatttcgagggtgatttctggcccaatgttctggaagaaagcattaaggaactggaacaggaggaagaagagagaaaacgagaggaaaacaccagcaatgaaagcacagatgtgaccaagggagacagcaaaaatgctaaaaagaagaataataagaaaaccagcaaaaataagagcagcctgagtaggggcaacaagaagaaacccgggatgcccaatgtatctaacgacctctcacagaaactatatgccaccatggagaagcataaagaggtcttctttgtgatccgcctcattgctggccctgctgccaactccctgcctcccattgttgatcctgatcctctcatcccctgcgatctgatggatggtcgggatgcgtttctcacgctggcaagggacaagcacctggagttctcttcactccgaagagcccagtggtccaccatgtgcatgctggtggagctgcacacgcagagccaggaccgctttgtctacacctgcaatgaatgcaagcaccatgtggagacacgctggcactgtactgtctgtgaggattatgacttgtgtatcacctgctataacactaaaaaccatgaccacaaaatggagaaactaggccttggcttagatgatgagagcaacaaccagcaggctgcagccacccagagcccaggcgattctcgccgcctgagtatccagcgctgcatccagtctctggtccatgcttgccagtgtcggaatgccaattgctcactgccatcctgccagaagatgaagcgggttgtgcagcataccaagggttgcaaacggaaaaccaatggcgggtgccccatctgcaagcagctcattgccctctgctgctaccatgccaagcactgccaggagaacaaatgcccggtgccgttctgcctaaacatcaagcagaagctccggcagcaacagctgcagcaccgactacagcaggcccaaatgcttcgcaggaggatggccagcatgcagcggactggtgtggttgggcagcaacagggcctcccttcccccactcctgccactccaacgacaccaactggccaacagccaaccaccccgcagacgccccagcccacttctcagcctcagcctacccctcccaatagcatgccaccctacttgcccaggactcaagctgctggccctgtgtcccagggtaaggcagcaggccaggtgacccctccaacccctcctcagactgctcagccaccccttccagggcccccacctgcagcagtggaaatggcaatgcagattcagagagcagcggagacgcagcgccagatggcccacgtgcaaatttttcaaaggccaatccaacaccagatgcccccgatgactcccatggcccccatgggtatgaacccacctcccatgaccagaggtcccagtgggcatttggagccagggatgggaccgacagggatgcagcaacagccaccctggagccaaggaggattgcctcagccccagcaactacagtctgggatgccaaggccagccatgatgtcagtggcccagcatggtcaacctttgaacatggctccacaaccaggattgggccaggtaggtatcagcccactcaaaccaggcactgtgtctcaacaagccttacaaaaccttttgcggactctcaggtctcccagctctcccctgcagcagcaacaggtgcttagtatccttcacgccaacccccagctgttggctgcattcatcaagcagcgggctgccaagtatgccaactctaatccacaacccatccctgggcagcctggcatgccccaggggcagccagggctacagccacctaccatgccaggtcagcagggggtccactccaatccagccatgcagaacatgaatccaatgcaggcgggcgttcagagggctggcctgccccagcagcaaccacagcagcaactccagccacccatgggagggatgagcccccaggctcagcagatgaacatgaaccacaacaccatgccttcacaattccgagacatcttgagacgacagcaaatgatgcaacagcagcagcaacagggagcagggccaggaataggccctggaatggccaaccataaccagttccagcaaccccaaggagttggctacccaccacagcagcagcagcggatgcagcatcacatgcaacagatgcaacaaggaaatatgggacagataggccagcttccccaggccttgggagcagaggcaggtgccagtctacaggcctatcagcagcgactccttcagcaacagatggggtcccctgttcagcccaaccccatgagcccccagcagcatatgctcccaaatcaggcccagtccccacacctacaaggccagcagatccctaattctctctccaatcaagtgcgctctccccagcctgtcccttctccacggccacagtcccagcccccccactccagtccttccccaaggatgcagcctcagccttctccacaccacgtttccccacagacaagttccccacatcctggactggtagctgcccaggccaaccccatggaacaagggcattttgccagcccggaccagaattcaatgctttctcagcttgctagcaatccaggcatggcaaacctccatggtgcaagcgccacggacctgggactcagcaccgataactcagacttgaattcaaacctctcacagagtacactagacatacactagagacaccttgtagtattttgggagcaaaaaaattattttctcttaacaagactttttgtactgaaaacaatttttttgaatctttcgtagcctaaaagacaattttccttggaacacataagaactgtgcagtagccgtttgtggtttaaagcaaacatgcaagatgaacctgagggatgatagaatacaaagaatatatttttgttatggctggttaccaccagcctttcttcccctttgtgtgtgtggttcaagtgtgcactgggaggaggctgaggcctgtgaagccaaacaatatgctcctgccttgcacctccaataggttttattattttttttaaattaatgaacatatgtaatattaatagttattatttactggtgcagatggttgacatttttccctattttcctcactttatggaagagttaaaacatttctaaaccagaggacaaaaggggttaatgttactttaaaattacattctatatatatataaatatatataaatatatattaaaataccagttttttttctctgggtgcaaagatgttcattcttttaaaaaatgtttaaaaaaaaaaaaaaactgcctttcttcccctcaagtcaacttttgtgctccagaaaattttctattctgtaagtctgagcgtaaaacttcaagtattaaaataatttgtacatgtagagagaaaaatgactttttcaaaaatatacaggggcagctgccaaattgatgtattatatattgtggtttctgtttcttgaaagaatttttttcgttatttttacatctaacaaagtaaaaaaattaaaaagagggtaagaaacgattccggtgggatgattttaacatgcaaaatgtccctgggggtttcttctttgcttgctttcttcctccttaccctaccccccactcacacacacacacacacacacacacacacacacacacacacactttctataaaacttgaaaatagcaaaaaccctcaactgttgtaaatcatgcaattaaagttgattacttataaatatgaactttggatcactgtatagactgttaaatttgatttcttattacctattgttaaataaactgtgtgagacagaca

SEQ ID NO: 210 - DNA, 2351 bp, Homo sapiens
  gene (1)..(2351): Accession No. NM_001993
gaggcgcgggagagcgcgccgccggccctttatagcgcgcggggcaccggctccccaagactgcgagctccccgcaccccctcgcactccctctggccggcccagggcgccttcagcccaacctccccagccccacgggcgccacggaacccgctcgatctcgccgccaactggtagacatggagacccctgcctggccccgggtcccgcgccccgagaccgccgtcgctcggacgctcctgctcggctgggtcttcgcccaggtggccggcgcttcaggcactacaaatactgtggcagcatataatttaacttggaaatcaactaatttcaagacaattttggagtgggaacccaaacccgtcaatcaagtctacactgttcaaataagcactaagtcaggagattggaaaagcaaatgcttttacacaacagacacagagtgtgacctcaccgacgagattgtgaaggatgtgaagcagacgtacttggcacgggtcttctcctacccggcagggaatgtggagagcaccggttctgctggggagcctctgtatgagaactccccagagttcacaccttacctggagacaaacctcggacagccaacaattcagagttttgaacaggtgggaacaaaagtgaatgtgaccgtagaagatgaacggactttagtcagaaggaacaacactttcctaagcctccgggatgtttttggcaaggacttaatttatacactttattattggaaatcttcaagttcaggaaagaaaacagccaaaacaaacactaatgagtttttgattgatgtggataaaggagaaaactactgtttcagtgttcaagcagtgattccctcccgaacagttaaccggaagagtacagacagcccggtagagtgtatgggccaggagaaaggggaattcagagaaatattctacatcattggagctgtggtatttgtggtcatcatccttgtcatcatcctggctatatctctacacaagtgtagaaaggcaggagtggggcagagctggaaggagaactccccactgaatgtttcataaaggaagcactgttggagctactgcaaatgctatattgcactgtgaccgagaacttttaagaggatagaatacatggaaacgcaaatgagtatttcggagcatgaagaccctggagttcaaaaaactcttgatatgacctgttattaccattagcattctggttttgacatcagcattagtcactttgaaatgtaacgaatggtactacaaccaattccaagttttaatttttaacaccatggcaccttttgcacataacatgctttagattatatattccgcactcaaggagtaaccaggtcgtccaagcaaaaacaaatgggaaaatgtcttaaaaaatcctgggtggacttttgaaaagcttttttttttttttttttttttttgagacggagtcttgctctgttgcccaggctggagtgcagtagcacgatctcggctcactgcaccctccgtctctcgggttcaagcaattgtctgcctcagcctcccgagtagctgggattacaggtgcgcactaccacgccaagctaatttttgtattttttagtagagatggggtttcaccatcttggccaggctggtcttgaattcctgacctcaggtgatccacccaccttggcctcccaaagtgctagtattatgggcgtgaaccaccatgcccagccgaaaagcttttgaggggctgacttcaatccatgtaggaaagtaaaatggaaggaaattgggtgcatttctaggacttttctaacatatgtctataatatagtgtttaggttcttttttttttcaggaatacatttggaaattcaaaacaattggcaaactttgtattaatgtgttaagtgcaggagacattggtattctgggcaccttcctaatatgctttacaatctgcactttaactgacttaagtggcattaaacatttgagagctaactatatttttataagactactatacaaactacagagtttatgatttaaggtacttaaagcttctatggttgacattgtatatataattttttaaaaaggttttctatatggggattttctatttatgtaggtaatattgttctatttgtatatattgagataatttatttaatatactttaaataaaggtgactgggaattgttactgttgtacttattctatcttccatttattatttatgtacaatttggtgtttgtattagctctactacagtaaatgactgtaaaattgtcagtggcttacaacaacgtatctttttcgcttataatacattttggtgact

SEQ ID NO: 211 - DNA, 6774 bp, Homo sapiens
  gene (1)..(6774): Accession No. NM_002006
cggccccagaaaacccgagcgagtagggggcggcgcgcaggagggaggagaactgggggcgcgggaggctggtgggtgtggggggtggagatgtagaagatgtgacgccgcggcccggcgggtgccagattagcggacgcggtgcccgcggttgcaacgggatcccgggcgctgcagcttgggaggcggctctccccaggcggcgtccgcggagacacccatccgtgaaccccaggtcccgggccgccggctcgccgcgcaccaggggccggcggacagaagagcggccgagcggctcgaggctgggggaccgcgggcgcggccgcgcgctgccgggcgggaggctggggggccggggccggggccgtgccccggagcgggtcggaggccggggccggggccgggggacggcggctccccgcgcggctccagcggctcggggatcccggccgggccccgcagggaccatggcagccgggagcatcaccacgctgcccgccttgcccgaggatggcggcagcggcgccttcccgcccggccacttcaaggaccccaagcggctgtactgcaaaaacgggggcttcttcctgcgcatccaccccgacggccgagttgacggggtccgggagaagagcgaccctcacatcaagctacaacttcaagcagaagagagaggagttgtgtctatcaaaggagtgtgtgctaaccgttacctggctatgaaggaagatggaagattactggcttctaaatgtgttacggatgagtgtttcttttttgaacgattggaatctaataactacaatacttaccggtcaaggaaatacaccagttggtatgtggcactgaaacgaactgggcagtataaacttggatccaaaacaggacctgggcagaaagctatactttttcttccaatgtctgctaagagctgattttaatggccacatctaatctcatttcacatgaaagaagaagtatattttagaaatttgttaatgagagtaaaagaaaataaatgtgtatagctcagtttggataattggtcaaacaattttttatccagtagtaaaatatgtaaccattgtcccagtaaagaaaaataacaaaagttgtaaaatgtatattctcccttttatattgcatctgctgttacccagtgaagcttacctagagcaatgatctttttcacgcatttgctttattcgaaaagaggcttttaaaatgtgcatgtttagaaacaaaatttcttcatggaaatcatatacattagaaaatcacagtcagatgtttaatcaatccaaaatgtccactatttcttatgtcattcgttagtctacatgtttctaaacatataaatgtgaatttaatcaattcctttcatagttttataattctctggcagttccttatgatagagtttataaaacagtcctgtgtaaactgctggaagttcttccacagtcaggtcaattttgtcaaacccttctctgtacccatacagcagcagcctagcaactctgctggtgatgggagttgtattttcagtcttcgccaggtcattgagatccatccactcacatcttaagcattcttcctggcaaaaatttatggtgaatgaatatggctttaggcggcagatgatatacatatctgacttcccaaaagctccaggatttgtgtgctgttgccgaatactcaggacggacctgaattctgattttataccagtctcttcaaaaacttctcgaaccgctgtgtctcctacgtaaaaaaagagatgtacaaatcaataataattacacttttagaaactgtatcatcaaagattttcagttaaagtagcattatgtaaaggctcaaaacattaccctaacaaagtaaagttttcaatacaaattctttgccttgtggatatcaagaaatcccaaaatattttcttaccactgtaaattcaagaagcttttgaaatgctgaatatttctttggctgctacttggaggcttatctacctgtacatttttggggtcagctctttttaacttcttgctgctctttttcccaaaaggtaaaaatatagattgaaaagttaaaacattttgcatggctgcagttcctttgtttcttgagataagattccaaagaacttagattcatttcttcaacaccgaaatgctggaggtgtttgatcagttttcaagaaacttggaatataaataattttataattcaacaaaggttttcacattttataaggttgatttttcaattaaatgcaaatttgtgtggcaggatttttattgccattaacatatttttgtggctgctttttctacacatccagatggtccctctaactgggctttctctaattttgtgatgttctgtcattgtctcccaaagtatttaggagaagccctttaaaaagctgccttcctctaccactttgctggaaagcttcacaattgtcacagacaaagatttttgttccaatactcgttttgcctctatttttcttgtttgtcaaatagtaaatgatatttgcccttgcagtaattctactggtgaaaaacatgcaaagaagaggaagtcacagaaacatgtctcaattcccatgtgctgtgactgtagactgtcttaccatagactgtcttacccatcccctggatatgctcttgttttttccctctaatagctatggaaagatgcatagaaagagtataatgttttaaaacataaggcattcgtctgccatttttcaattacatgctgacttcccttacaattgagatttgcccataggttaaacatggttagaaacaactgaaagcataaaagaaaaatctaggccgggtgcagtggctcatgcctatattccctgcactttgggaggccaaagcaggaggatcgcttgagcccaggagttcaagaccaacctggtgaaaccccgtctctacaaaaaaacacaaaaaatagccaggcatggtggcgtgtacatgtggtctcagatacttgggaggctgaggtgggagggttgatcacttgaggctgagaggtcaaggttgcagtgagccataatcgtgccactgcagtccagcctaggcaacagagtgagactttgtctcaaaaaaagagaaattttccttaataagaaaagtaatttttactctgatgtgcaatacatttgttattaaatttattatttaagatggtagcactagtcttaaattgtataaaatatcccctaacatgtttaaatgtccatttttattcattatgctttgaaaaataattatggggaaatacatgtttgttattaaatttattattaaagatagtagcactagtcttaaatttgatataacatctcctaacttgtttaaatgtccatttttattctttatgtttgaaaataaattatggggatcctatttagctcttagtaccactaatcaaaagttcggcatgtagctcatgatctatgctgtttctatgtcgtggaagcaccggatgggggtagtgagcaaatctgccctgctcagcagtcaccatagcagctgactgaaaatcagcactgcctgagtagttttgatcagtttaacttgaatcactaactgactgaaaattgaatgggcaaataagtgcttttgtctccagagtatgcgggagacccttccacctcaagatggatatttcttccccaaggatttcaagatgaattgaaatttttaatcaagatagtgtgctttattctgttgtattttttattattttaatatactgtaagccaaactgaaataacatttgctgttttataggtttgaagaacataggaaaaactaagaggttttgtttttatttttgctgatgaagagatatgtttaaatatgttgtattgttttgtttagttacaggacaataatgaaatggagtttatatttgttatttctattttgttatatttaataatagaattagattgaaataaaatataatgggaaataatctgcagaatgtgggttttcctggtgtttccctctgactctagtgcactgatgatctctgataaggctcagctgctttatagttctctggctaatgcagcagatactcttcctgccagtggtaatacgattttttaagaaggcagtttgtcaattttaatcttgtggatacctttatactcttagggtattattttatacaaaagccttgaggattgcattctattttctatatgaccctcttgatatttaaaaaacactatggataacaattcttcatttacctagtattatgaaagaatgaaggagttcaaacaaatgtgtttcccagttaactagggtttactgtttgagccaatataaatgtttaactgtttgtgatggcagtattcctaaagtacattgcatgttttcctaaatacagagtttaaataatttcagtaattcttagatgattcagcttcatcattaagaatatcttttgttttatgttgagttagaaatgccttcatatagacatagtctttcagacctctactgtcagttttcatttctagctgctttcagggttttatgaattttcaggcaaagctttaatttatactaagcttaggaagtatggctaatgccaacggcagtttttttcttcttaattccacatgactgaggcatatatgatctctgggtaggtgagttgttgtgacaaccacaagcactttttttttttttaaagaaaaaaaggtagtgaatttttaatcatctggactttaagaaggattctggagtatacttaggcctgaaattatatatatttggcttggaaatgtgtttttcttcaattacatctacaagtaagtacagctgaaattcagaggacccataagagttcacatgaaaaaaatcaatttatttgaaaaggcaagatgcaggagagaggaagccttgcaaacctgcagactgctttttgcccaatatagattgggtaaggctgcaaaacataagcttaattagctcacatgctctgctctcacgtggcaccagtggatagtgtgagagaattaggctgtagaacaaatggccttctctttcagcattcacaccactacaaaatcatcttttatatcaacagaagaataagcataaactaagcaaaaggtcaataagtacctgaaaccaagattggctagagatatatcttaatgcaatccattttctgatggattgttacgagttggctatataatgtatgtatggtattttgatttgtgtaaaagttttaaaaatcaagctttaagtacatggacatttttaaataaaatatttaaagacaatttagaaaattgccttaatatcattgttggctaaatagaataggggacatgcatattaaggaaaaggtcatggagaaataatattggtatcaaacaaatacattgatttgtcatgatacacattgaatttgatccaatagtttaaggaataggtaggaaaatttggtttctatttttcgatttcctgtaaatcagtgacataaataattcttagcttattttatatttccttgtcttaaatactgagctcagtaagttgtgttaggggattatttctcagttgagactttcttatatgacattttactatgttttgacttcctgactattaaaaataaatagtagatacaattttcataaagtgaagaattatataatcactgctttataactgactttattatatttatttcaaagttcatttaaaggctactattcatcctctgtgatggaatggtcaggaatttgttttctcatagtttaattccaacaacaatattagtcgtatccaaaataacctttaatgctaaactttactgatgtatatccaaagcttctcattttcagacagattaatccagaagcagtcataaacagaagaataggtggtatgttcctaatgatattatttctactaatggaataaactgtaatattagaaattatgctgctaattatatcagctctgaggtaatttctgaaatgttcagactcagtcggaacaaattggaaaatttaaatttttattcttagctataaagcaagaaagtaaacacattaatttcctcaacatttttaagccaattaaaaatataaaagatacacaccaatatcttcttcaggctctgacaggcctcctggaaacttccacatatttttcaactgcagtataaagtcagaaaataaagttaacataactttcactaacacacacatatgtagatttcacaaaatccacctataattggtcaaagtggttgagaatatattttttagtaattgcatgcaaaatttttctagcttccatcctttctccctcgtttcttctttttttgggggagctggtaactgatgaaatcttttcccaccttttctcttcaggaaatataagtggttttgtttggttaacgtgatacattctgtatgaatgaaacattggagggaaacatctactgaatttctgtaatttaaaatattttgctgctagttaactatgaacagatagaagaatcttacagatgctgctataaataagtagaaaatataaatttcatcactaaaatatgctattttaaaatctatttcctatattgtatttctaatcagatgtattactcttattatttctattgtatgtgttaatgattttatgtaaaaatgtaattgcttttcatgagtagtatgaataaaattgattagtttgtgttttcttgtctccc

SEQ ID NO: 212 - DNA, 8815 bp, Homo sapiens
  gene (1)..(8815): Accession No. NM_212482
gcccgcgccggctgtgctgcacagggggaggagagggaaccccaggcgcgagcgggaagaggggacctgcagccacaacttctctggtcctctgcatcccttctgtccctccacccgtccccttccccaccctctggcccccaccttcttggaggcgacaacccccgggaggcattagaagggatttttcccgcaggttgcgaagggaagcaaacttggtggcaacttgcctcccggtgcgggcgtctctcccccaccgtctcaacatgcttaggggtccggggcccgggctgctgctgctggccgtccagtgcctggggacagcggtgccctccacgggagcctcgaagagcaagaggcaggctcagcaaatggttcagccccagtccccggtggctgtcagtcaaagcaagcccggttgttatgacaatggaaaacactatcagataaatcaacagtgggagcggacctacctaggcaatgcgttggtttgtacttgttatggaggaagccgaggttttaactgcgagagtaaacctgaagctgaagagacttgctttgacaagtacactgggaacacttaccgagtgggtgacacttatgagcgtcctaaagactccatgatctgggactgtacctgcatcggggctgggcgagggagaataagctgtaccatcgcaaaccgctgccatgaagggggtcagtcctacaagattggtgacacctggaggagaccacatgagactggtggttacatgttagagtgtgtgtgtcttggtaatggaaaaggagaatggacctgcaagcccatagctgagaagtgttttgatcatgctgctgggacttcctatgtggtcggagaaacgtgggagaagccctaccaaggctggatgatggtagattgtacttgcctgggagaaggcagcggacgcatcacttgcacttctagaaatagatgcaacgatcaggacacaaggacatcctatagaattggagacacctggagcaagaaggataatcgaggaaacctgctccagtgcatctgcacaggcaacggccgaggagagtggaagtgtgagaggcacacctctgtgcagaccacatcgagcggatctggccccttcaccgatgttcgtgcagctgtttaccaaccgcagcctcacccccagcctcctccctatggccactgtgtcacagacagtggtgtggtctactctgtggggatgcagtggctgaagacacaaggaaataagcaaatgctttgcacgtgcctgggcaacggagtcagctgccaagagacagctgtaacccagacttacggtggcaactcaaatggagagccatgtgtcttaccattcacctacaatggcaggacgttctactcctgcaccacagaagggcgacaggacggacatctttggtgcagcacaacttcgaattatgagcaggaccagaaatactctttctgcacagaccacactgttttggttcagactcgaggaggaaattccaatggtgccttgtgccacttccccttcctatacaacaaccacaattacactgattgcacttctgagggcagaagagacaacatgaagtggtgtgggaccacacagaactatgatgccgaccagaagtttgggttctgccccatggctgcccacgaggaaatctgcacaaccaatgaaggggtcatgtaccgcattggagatcagtgggataagcagcatgacatgggtcacatgatgaggtgcacgtgtgttgggaatggtcgtggggaatggacatgcattgcctactcgcagcttcgagatcagtgcattgttgatgacatcacttacaatgtgaacgacacattccacaagcgtcatgaagaggggcacatgctgaactgtacatgcttcggtcagggtcggggcaggtggaagtgtgatcccgtcgaccaatgccaggattcagagactgggacgttttatcaaattggagattcatgggagaagtatgtgcatggtgtcagataccagtgctactgctatggccgtggcattggggagtggcattgccaacctttacagacctatccaagctcaagtggtcctgtcgaagtatttatcactgagactccgagtcagcccaactcccaccccatccagtggaatgcaccacagccatctcacatttccaagtacattctcaggtggagacctaaaaattctgtaggccgttggaaggaagctaccataccaggccacttaaactcctacaccatcaaaggcctgaagcctggtgtggtatacgagggccagctcatcagcatccagcagtacggccaccaagaagtgactcgctttgacttcaccaccaccagcaccagcacacctgtgaccagcaacaccgtgacaggagagacgactcccttttctcctcttgtggccacttctgaatctgtgaccgaaatcacagccagtagctttgtggtctcctgggtctcagcttccgacaccgtgtcgggattccgggtggaatatgagctgagtgaggagggagatgagccacagtacctggatcttccaagcacagccacttctgtgaacatccctgacctgcttcctggccgaaaatacattgtaaatgtctatcagatatctgaggatggggagcagagtttgatcctgtctacttcacaaacaacagcgcctgatgcccctcctgacccgactgtggaccaagttgatgacacctcaattgttgttcgctggagcagaccccaggctcccatcacagggtacagaatagtctattcgccatcagtagaaggtagcagcacagaactcaaccttcctgaaactgcaaactccgtcaccctcagtgacttgcaacctggtgttcagtataacatcactatctatgctgtggaagaaaatcaagaaagtacacctgttgtcattcaacaagaaaccactggcaccccacgctcagatacagtgccctctcccagggacctgcagtttgtggaagtgacagacgtgaaggtcaccatcatgtggacaccgcctgagagtgcagtgaccggctaccgtgtggatgtgatccccgtcaacctgcctggcgagcacgggcagaggctgcccatcagcaggaacacctttgcagaagtcaccgggctgtcccctggggtcacctattacttcaaagtctttgcagtgagccatgggagggagagcaagcctctgactgctcaacagacaaccaaactggatgctcccactaacctccagtttgtcaatgaaactgattctactgtcctggtgagatggactccacctcgggcccagataacaggataccgactgaccgtgggccttacccgaagaggacagcccaggcagtacaatgtgggtccctctgtctccaagtacccactgaggaatctgcagcctgcatctgagtacaccgtatccctcgtggccataaagggcaaccaagagagccccaaagccactggagtctttaccacactgcagcctgggagctctattccaccttacaacaccgaggtgactgagaccaccattgtgatcacatggacgcctgctccaagaattggttttaagctgggtgtacgaccaagccagggaggagaggcaccacgagaagtgacttcagactcaggaagcatcgttgtgtccggcttgactccaggagtagaatacgtctacaccatccaagtcctgagagatggacaggaaagagatgcgccaattgtaaacaaagtggtgacaccattgtctccaccaacaaacttgcatctggaggcaaaccctgacactggagtgctcacagtctcctgggagaggagcaccaccccagacattactggttatagaattaccacaacccctacaaacggccagcagggaaattctttggaagaagtggtccatgctgatcagagctcctgcacttttgataacctgagtcccggcctggagtacaatgtcagtgtttacactgtcaaggatgacaaggaaagtgtccctatctctgataccatcatcccagaggtgccccaactcactgacctaagctttgttgatataaccgattcaagcatcggcctgaggtggaccccgctaaactcttccaccattattgggtaccgcatcacagtagttgcggcaggagaaggtatccctatttttgaagattttgtggactcctcagtaggatactacacagtcacagggctggagccgggcattgactatgatatcagcgttatcactctcattaatggcggcgagagtgcccctactacactgacacaacaaacggctgttcctcctcccactgacctgcgattcaccaacattggtccagacaccatgcgtgtcacctgggctccacccccatccattgatttaaccaacttcctggtgcgttactcacctgtgaaaaatgaggaagatgttgcagagttgtcaatttctccttcagacaatgcagtggtcttaacaaatctcctgcctggtacagaatatgtagtgagtgtctccagtgtctacgaacaacatgagagcacacctcttagaggaagacagaaaacaggtcttgattccccaactggcattgacttttctgatattactgccaactcttttactgtgcactggattgctcctcgagccaccatcactggctacaggatccgccatcatcccgagcacttcagtgggagacctcgagaagatcgggtgccccactctcggaattccatcaccctcaccaacctcactccaggcacagagtatgtggtcagcatcgttgctcttaatggcagagaggaaagtcccttattgattggccaacaatcaacagtttctgatgttccgagggacctggaagttgttgctgcgacccccaccagcctactgatcagctgggatgctcctgctgtcacagtgagatattacaggatcacttacggagagacaggaggaaatagccctgtccaggagttcactgtgcctgggagcaagtctacagctaccatcagcggccttaaacctggagttgattataccatcactgtgtatgctgtcactggccgtggagacagccccgcaagcagcaagccaatttccattaattaccgaacagaaattgacaaaccatcccagatgcaagtgaccgatgttcaggacaacagcattagtgtcaagtggctgccttcaagttcccctgttactggttacagagtaaccaccactcccaaaaatggaccaggaccaacaaaaactaaaactgcaggtccagatcaaacagaaatgactattgaaggcttgcagcccacagtggagtatgtggttagtgtctatgctcagaatccaagcggagagagtcagcctctggttcagactgcagtaaccaacattgatcgccctaaaggactggcattcactgatgtggatgtcgattccatcaaaattgcttgggaaagcccacaggggcaagtttccaggtacagggtgacctactcgagccctgaggatggaatccatgagctattccctgcacctgatggtgaagaagacactgcagagctgcaaggcctcagaccgggttctgagtacacagtcagtgtggttgccttgcacgatgatatggagagccagcccctgattggaacccagtccacagctattcctgcaccaactgacctgaagttcactcaggtcacacccacaagcctgagcgcccagtggacaccacccaatgttcagctcactggatatcgagtgcgggtgacccccaaggagaagaccggaccaatgaaagaaatcaaccttgctcctgacagctcatccgtggttgtatcaggacttatggtggccaccaaatatgaagtgagtgtctatgctcttaaggacactttgacaagcagaccagctcagggagttgtcaccactctggagaatgtcagcccaccaagaagggctcgtgtgacagatgctactgagaccaccatcaccattagctggagaaccaagactgagacgatcactggcttccaagttgatgccgttccagccaatggccagactccaatccagagaaccatcaagccagatgtcagaagctacaccatcacaggtttacaaccaggcactgactacaagatctacctgtacaccttgaatgacaatgctcggagctcccctgtggtcatcgacgcctccactgccattgatgcaccatccaacctgcgtttcctggccaccacacccaattccttgctggtatcatggcagccgccacgtgccaggattaccggctacatcatcaagtatgagaagcctgggtctcctcccagagaagtggtccctcggccccgccctggtgtcacagaggctactattactggcctggaaccgggaaccgaatatacaatttatgtcattgccctgaagaataatcagaagagcgagcccctgattggaaggaaaaagacagacgagcttccccaactggtaacccttccacaccccaatcttcatggaccagagatcttggatgttccttccacagttcaaaagacccctttcgtcacccaccctgggtatgacactggaaatggtattcagcttcctggcacttctggtcagcaacccagtgttgggcaacaaatgatctttgaggaacatggttttaggcggaccacaccgcccacaacggccacccccataaggcataggccaagaccatacccgccgaatgtaggtgaggaaatccaaattggtcacatccccagggaagatgtagactatcacctgtacccacacggtccgggactcaatccaaatgcctctacaggacaagaagctctctctcagacaaccatctcatgggccccattccaggacacttctgagtacatcatttcatgtcatcctgttggcactgatgaagaacccttacagttcagggttcctggaacttctaccagtgccactctgacaggcctcaccagaggtgccacctacaacatcatagtggaggcactgaaagaccagcagaggcataaggttcgggaagaggttgttaccgtgggcaactctgtcaacgaaggcttgaaccaacctacggatgactcgtgctttgacccctacacagtttcccattatgccgttggagatgagtgggaacgaatgtctgaatcaggctttaaactgttgtgccagtgcttaggctttggaagtggtcatttcagatgtgattcatctagatggtgccatgacaatggtgtgaactacaagattggagagaagtgggaccgtcagggagaaaatggccagatgatgagctgcacatgtcttgggaacggaaaaggagaattcaagtgtgaccctcatgaggcaacgtgttatgatgatgggaagacataccacgtaggagaacagtggcagaaggaatatctcggtgccatttgctcctgcacatgctttggaggccagcggggctggcgctgtgacaactgccgcagacctgggggtgaacccagtcccgaaggcactactggccagtcctacaaccagtattctcagagataccatcagagaacaaacactaatgttaattgcccaattgagtgcttcatgcctttagatgtacaggctgacagagaagattcccgagagtaaatcatctttccaatccagaggaacaagcatgtctctctgccaagatccatctaaactggagtgatgttagcagacccagcttagagttcttctttctttcttaagccctttgctctggaggaagttctccagcttcagctcaactcacagcttctccaagcatcaccctgggagtttcctgagggttttctcataaatgagggctgcacattgcctgttctgcttcgaagtattcaataccgctcagtattttaaatgaagtgattctaagatttggtttgggatcaataggaaagcatatgcagccaaccaagatgcaaatgttttgaaatgatatgaccaaaattttaagtaggaaagtcacccaaacacttctgctttcacttaagtgtctggcccgcaatactgtaggaacaagcatgatcttgttactgtgatattttaaatatccacagtactcactttttccaaatgatcctagtaattgcctagaaatatctttctcttacctgttatttatcaatttttcccagtatttttatacggaaaaaattgtattgaaaacacttagtatgcagttgataagaggaatttggtataattatggtgggtgattattttttatactgtatgtgccaaagctttactactgtggaaagacaactgttttaataaaagatttacattccacaacttgaagttcatctatttgatataagacaccttcgggggaaataattcctgtgaatattctttttcaattcagcaaacatttgaaaatctatgatgtgcaagtctaattgttgatttcagtacaagattttctaaatcagttgctacaaaaactgattggtttttgtcacttcatctcttcactaatggagatagctttacactttctgctttaatagatttaagtggaccccaatatttattaaaattgctagtttaccgttcagaagtataatagaaataatctttagttgctcttttctaaccattgtaattcttcccttcttccctccacctttccttcattgaataaacctctgttcaaagagattgcctgcaagggaaataaaaatgactaagatattaaaaaaaaaaaaaaaaaa

SEQ ID NO: 213 - DNA, 2603 bp, Homo sapiens
  gene (1)..(2603): Accession No. NM_002755
aggcgaggcttccccttccccgcccctcccccggcctccagtccctcccagggccgcttcgcagagcggctaggagcacggcggcggcggcactttccccggcaggagctggagctgggctctggtgcgcgcgcggctgtgccgcccgagccggagggactggttggttgagagagagagaggaagggaatcccgggctgccgaaccgcacgttcagcccgctccgctcctgcagggcagcctttcggctctctgcgcgcgaagccgagtcccgggcgggtggggcgggggtccactgagaccgctaccggcccctcggcgctgacgggaccgcgcggggcgcacccgctgaaggcagccccggggcccgcggcccggacttggtcctgcgcagcgggcgcggggcagcgcagcgggaggaagcgagaggtgctgccctccccccggagttggaagcgcgttacccgggtccaaaatgcccaagaagaagccgacgcccatccagctgaacccggcccccgacggctctgcagttaacgggaccagctctgcggagaccaacttggaggccttgcagaagaagctggaggagctagagcttgatgagcagcagcgaaagcgccttgaggcctttcttacccagaagcagaaggtgggagaactgaaggatgacgactttgagaagatcagtgagctgggggctggcaatggcggtgtggtgttcaaggtctcccacaagccttctggcctggtcatggccagaaagctaattcatctggagatcaaacccgcaatccggaaccagatcataagggagctgcaggttctgcatgagtgcaactctccgtacatcgtgggcttctatggtgcgttctacagcgatggcgagatcagtatctgcatggagcacatggatggaggttctctggatcaagtcctgaagaaagctggaagaattcctgaacaaattttaggaaaagttagcattgctgtaataaaaggcctgacatatctgagggagaagcacaagatcatgcacagagatgtcaagccctccaacatcctagtcaactcccgtggggagatcaagctctgtgactttggggtcagcgggcagctcatcgactccatggccaactccttcgtgggcacaaggtcctacatgtcgccagaaagactccaggggactcattactctgtgcagtcagacatctggagcatgggactgtctctggtagagatggcggttgggaggtatcccatccctcctccagatgccaaggagctggagctgatgtttgggtgccaggtggaaggagatgcggctgagaccccacccaggccaaggacccccgggaggccccttagctcatacggaatggacagccgacctcccatggcaatttttgagttgttggattacatagtcaacgagcctcctccaaaactgcccagtggagtgttcagtctggaatttcaagattttgtgaataaatgcttaataaaaaaccccgcagagagagcagatttgaagcaactcatggttcatgcttttatcaagagatctgatgctgaggaagtggattttgcaggttggctctgctccaccatcggccttaaccagcccagcacaccaacccatgctgctggcgtctaagtgtttgggaagcaacaaagagcgagtcccctgcccggtggtttgccatgtcgcttttgggcctccttcccatgcctgtctctgttcagatgtgcatttcacctgtgacaaaggatgaagaacacagcatgtgccaagattctactcttgtcatttttaatattactgtctttattcttattactattattgttcccctaagtggattggctttgtgcttggggctatttgtgtgtatgctgatgatcaaaacctgtgccaggctgaattacagtgaaattttggtgaatgtgggtagtcattcttacaattgcactgctgttcctgctccatgactggctgtctgcctgtattttcgggattctttgacatttggtggtactttattcttgctgggcatactttctctctaggagggagccttgtgagatccttcacaggcagtgcatgtgaagcatgctttgctgctatgaaaatgagcatcagagagtgtacatcatgttattttattattattatttgcttttcatgtagaactcagcagttgacatccaaatctagccagagcccttcactgccatgatagctggggcttcaccagtctgtctactgtggtgatctgtagacttctggttgtatttctatatttattttcagtatactgtgtgggatacttagtggtatgtctctttaagttttgattaatgtttcttaaatggaattattttgaatgtcacaaattgatcaagatattaaaatgtcggatttatctttccccatatccaagtaccaatgctgttgtaaacaacgtgtatagtgcctaaaattgtatgaaaatccttttaaccattttaacctagatgtttaacaaatctaatctcttattctaataaatatactatgaaataaaaaaaaaaggatgaaagctaaaaaaaaaaaaaaaaaa

SEQ ID NO: 214 - DNA, 5916 bp, Homo sapiens
  gene (1)..(5916): Accession No. NM_002745
gcccctccctccgcccgcccgccggcccgcccgtcagtctggcaggcaggcaggcaatcggtccgagtggctgtcggctcttcagctctcccgctcggcgtcttccttcctcctcccggtcagcgtcggcggctgcaccggcggcggcgcagtccctgcgggaggggcgacaagagctgagcggcggccgccgagcgtcgagctcagcgcggcggaggcggcggcggcccggcagccaacatggcggcggcggcggcggcgggcgcgggcccggagatggtccgcgggcaggtgttcgacgtggggccgcgctacaccaacctctcgtacatcggcgagggcgcctacggcatggtgtgctctgcttatgataatgtcaacaaagttcgagtagctatcaagaaaatcagcccctttgagcaccagacctactgccagagaaccctgagggagataaaaatcttactgcgcttcagacatgagaacatcattggaatcaatgacattattcgagcaccaaccatcgagcaaatgaaagatgtatatatagtacaggacctcatggaaacagatctttacaagctcttgaagacacaacacctcagcaatgaccatatctgctattttctctaccagatcctcagagggttaaaatatatccattcagctaacgttctgcaccgtgacctcaagccttccaacctgctgctcaacaccacctgtgatctcaagatctgtgactttggcctggcccgtgttgcagatccagaccatgatcacacagggttcctgacagaatatgtggccacacgttggtacagggctccagaaattatgttgaattccaagggctacaccaagtccattgatatttggtctgtaggctgcattctggcagaaatgctttctaacaggcccatctttccagggaagcattatcttgaccagctgaaccacattttgggtattcttggatccccatcacaagaagacctgaattgtataataaatttaaaagctaggaactatttgctttctcttccacacaaaaataaggtgccatggaacaggctgttcccaaatgctgactccaaagctctggacttattggacaaaatgttgacattcaacccacacaagaggattgaagtagaacaggctctggcccacccatatctggagcagtattacgacccgagtgacgagcccatcgccgaagcaccattcaagttcgacatggaattggatgacttgcctaaggaaaagctcaaagaactaatttttgaagagactgctagattccagccaggatacagatcttaaatttgtcaggacaagggctcagaggactggacgtgctcagacatcggtgttcttcttcccagttcttgacccctggtcctgtctccagcccgtcttggcttatccactttgactcctttgagccgtttggaggggcggtttctggtagttgtggcttttatgctttcaaagaatttcttcagtccagagaattcctcctggcagccctgtgtgtgtcacccattggtgacctgcggcagtatgtacttcagtgcacctactgcttactgttgctttagtcactaattgctttctggtttgaaagatgcagtggttcctccctctcctgaatccttttctacatgatgccctgctgaccatgcagccgcaccagagagagattcttccccaattggctctagtcactggcatctcactttatgatagggaaggctactacctagggcactttaagtcagtgacagccccttatttgcacttcaccttttgaccataactgtttccccagagcaggagcttgtggaaataccttggctgatgttgcagcctgcagcaagtgcttccgtctccggaatccttggggagcacttgtccacgtcttttctcatatcatggtagtcactaacatatataaggtatgtgctattggcccagcttttagaaaatgcagtcatttttctaaataaaaaggaagtactgcacccagcagtgtcactctgtagttactgtggtcacttgtaccatatagaggtgtaacacttgtcaagaagcgttatgtgcagtacttaatgtttgtaagacttacaaaaaaagatttaaagtggcagcttcactcgacatttggtgagagaagtacaaaggttgcagtgctgagctgtgggcggtttctggggatgtcccagggtggaactccacatgctggtgcatatacgcccttgagctacttcaaatgtgggtgtttcagtaaccacgttccatgcctgaggatttagcagagaggaacactgcgtctttaaatgagaaagtatacaattctttttccttctacagcatgtcagcatctcaagttcatttttcaacctacagtataacaatttgtaataaagcctccaggagctcatgacgtgaagcactgttctgtcctcaagtactcaaatatttctgatactgctgagtcagactgtcagaaaaagctagcactaactcgtgtttggagctctatccatattttactgatctctttaagtatttgttcctgccactgtgtactgtggagttgactcggtgttctgtcccagtgcggtgcctcctcttgacttccccactgctctctgtggtgagaaatttgccttgttcaataattactgtaccctcgcatgactgttacagctttctgtgcagagatgactgtccaagtgccacatgcctacgattgaaatgaaaactctattgttacctctgagttgtgttccacggaaaatgctatccagcagatcatttaggaaaaataattctatttttagcttttcatttctcagctgtccttttttcttgtttgatttttgacagcaatggagaatgggttatataaagactgcctgctaatatgaacagaaatgcatttgtaattcatgaaaataaatgtacatcttctatcttcacattcatgttaagattcagtgttgctttcctctggatcagcgtgtctgaatggacagtcaggttcaggttgtgctgaacacagaaatgctcacaggcctcactttgccgcccaggcactggcccagcacttggatttacataagatgagttagaaaggtacttctgtagggtcctttttacctctgctcggcagagaatcgatgctgtcatgttcctttattcacaatcttaggtctcaaatattctgtcaaaccctaacaaagaagccccgacatctcaggttggattccctggttctctctaaagagggcctgcccttgtgccccagaggtgctgctgggcacagccaagagttgggaagggccgccccacagtacgcagtcctcaccacccagcccagggtgctcacgctcaccactcctgtggctgaggaaggatagctggctcatcctcggaaaacagacccacatctctattcttgccctgaaatacgcgcttttcacttgcgtgctcagagctgccgtctgaaggtccacacagcattgacgggacacagaaatgtgactgttaccggataacactgattagtcagttttcatttataaaaaagcattgacagttttattactcttgtttctttttaaatggaaagttactattataaggttaatttggagtcctcttctaaatagaaaaccatatccttggctactaacatctggagactgtgagctccttcccattccccttcctggtactgtggagtcagattggcatgaaaccactaacttcattctagaatcattgtagccataagttgtgtgctttttattaatcatgccaaacataatgtaactgggcagagaatggtcctaaccaaggtacctatgaaaagcgctagctatcatgtgtagtagatgcatcattttggctcttcttacatttgtaaaaatgtacagattaggtcatcttaattcatattagtgacacggaacagcacctccactatttgtatgttcaaataagctttcagactaatagcttttttggtgtctaaaatgtaagcaaaaaattcctgctgaaacattccagtcctttcatttagtataaaagaaatactgaacaagccagtgggatggaattgaaagaactaatcatgaggactctgtcctgacacaggtcctcaaagctagcagagatacgcagacattgtggcatctgggtagaagaatactgtattgtgtgtgcagtgcacagtgtgtggtgtgtgcacactcattccttctgctcttgggcacaggcagtgggtgtagaggtaaccagtagctttgagaagctacatgtagctcaccagtggttttctctaaggaatcacaaaagtaaactacccaaccacatgccacgtaatatttcagccattcagaggaaactgttttctctttatttgcttatatgttaatatggtttttaaattggtaacttttatatagtatggtaacagtatgttaatacacacatacatacgcacacatgctttgggtccttccataatacttttatatttgtaaatcaatgttttggagcaatcccaagtttaagggaaatatttttgtaaatgtaatggttttgaaaatctgagcaatccttttgcttatacatttttaaagcatttgtgctttaaaattgttatgctggtgtttgaaacatgatactcctgtggtgcagatgagaagctataacagtgaatatgtggtttctcttacgtcatccaccttgacatgatgggtcagaaacaaatggaaatccagagcaagtcctccagggttgcaccaggtttacctaaagcttgttgccttttcttgtgctgtttatgcgtgtagagcactcaagaaagttctgaaactgctttgtatctgctttgtactgttggtgccttcttggtattgtaccccaaaattctgcatagattatttagtataatggtaagttaaaaaatgttaaaggaagattttattaagaatctgaatgtttattcattatattgttacaatttaacattaacatttatttgtggtatttgtgatttggttaatctgtataaaaattgtaagtagaaaggtttatatttcatcttaattcttttgatgttgtaaacgtactttttaaaagatggattatttgaatgtttatggcacctgacttgtaaaaaaaaaaaactacaaaaaaatccttagaatcattaaattgtgtccctgtattaccaaaataacacagcaccgtgcatgtatagtttaattgcagtttcatctgtgaaaacgtgaaattgtctagtccttcgttatgttccccagatgtcttccagatttgctctgcatgtggtaacttgtgttagggctgtgagctgttcctcgagttgaatggggatgtcagtgctcctagggttctccaggtggttcttcagaccttcacctgtgggggggggggtaggcggtgcccacgcccatctcctcatcctcctgaacttctgcaaccccactgctgggcagacatcctgggcaaccccttttttcagagcaagaagtcataaagataggatttcttggacatttggttcttatcaatattgggcattatgtaatgacttatttacaaaacaaagatactggaaaatgttttggatgtggtgttatggaaagagcacaggccttggacccatccagctgggttcagaactaccccctgcttataactgcggctggctgtgggccagtcattctgcgtctctgctttcttcctctgcttcagactgtcagctgtaaagtggaagcaatattacttgccttgtatatggtaaagattataaaaatacatttcaactgttcagcatagtacttcaaagcaagtactcagtaaatagcaagtctttttaaa

SEQ ID NO: 215 - DNA, 4499 bp, Homo sapiens
  gene (1)..(4499): Accession No. NM_005966
gccgccgccgcggccaagcgagcgccgtcggggcgggtgggcgggaagaagcggcgggcccgaggtgggggggagcagagagagcgcgcccaccaccttcccttcccccctcgatgggagcgggggcgtcccggctcctgcagccgccagaggagggagagccgggggccgtcgcttcggagttggggctgagcagtcctcggggagagcgcgccaagaccgctgcagccgctggctgacggaaggagagttttacatggaagtggcttacagaaacttggcgctgaggtgcagggaagccagaaactctttgtgtctctaaggccgatgaggaatttggaaacacatgtgggacatacaagcgttggatatagaggactgagcagggggaggaacatttaagctgatggaagtggaagtggaagttgctgtacattggcagcaaggcctccgagttagcttttgaatgcagttaactggtttctcttaactgtggaattcattgaaaagtcagactccgagtggtcgttccaggatatcttgaaaagcccaggttaaacccatccagagtaatggctgcggccttacccaggaccctgggggagttgcagctgtatagaatattacaaaaagccaatctactttcttattttgatgcctttatccaacaaggtggtgatgatgtccagcaactctgtgaagcaggagaagaggagtttttggaaatcatggcactcgtgggcatggctagcaagccccttcatgttagaaggctgcagaaggctttgagagactgggtcacaaaccctgggcttttcaatcagccactgacttcccttcctgtcagtagcatacccatctataaattaccagagggatcaccaacatggctgggaatatcctgcagtagttatgaaaggagtagcaatgcccgggaacctcatttaaaaatccccaaatgtgctgccaccacctgtgtgcagagcttgggacaggggaagtcagatgtggttgggagcctagcactgcagagtgttggtgagtccagactctggcaaggccaccatgccactgagagcgagcacagcctctccccagcagacctgggctcccccgcgtccccaaaggagagcagtgaggcgctggatgctgctgctgcgctctctgtggctgagtgtgtggagcggatggcccccacactgccaaaaagtgacttgaatgaagtgaaagagctgctaaaaaccaacaagaagttggccaaaatgattggtcacatctttgagatgaacgatgatgatccacacaaagaggaggaaattcggaaatacagtgcaatatatggcagatttgactcaaagaggaaggatgggaaacatctcacacttcatgagctcactgttaatgaagcggctgctcaactctgtgtgaaggataatgccctgctgacaagaagagatgagctttttgccttggctcgacagatttctcgagaagtcacctataaatatacttacagaaccaccaagtcaaaatgtggagaaagagatgaattatccccaaagagaattaaagtggaggatgggtttccagatttccaggattctgtgcaaacactcttccagcaggctagagctaagagtgaagaacttgcagctcttagttcacagcagcctgaaaaggtgatggcaaagcagatggagttcctttgcaaccaagctggctatgagagactgcagcatgccgagaggaggttgtctgcagggctttacaggcagagctcagaagagcacagtcctaacggcttgacttccgataactcagatggacaaggagaaagacctttgaatctccgaatgcctaatttacagaacagacaaccccatcattttgtggtggatggggagctgagcagactttaccccagtgaggcaaagtcccactcatcagagagccttgggattttaaaagactaccctcattcagcttttaccttagaaaagaaagtcatcaaaacagagcctgaagattcaagatagctgtgatttctctcaccgttctctggaaatggcatcagatttaaggataatactccatcatagaaataagccttaataaccagtgttgcctcattcagctcaaacagatttcatagccaaagcaaaaggactggtacggtagtctgtggaaaccaggaagataaaacaacagccacaaaagagaaaatcaagagtgttgcaatctataacagtaatattgattcattcacattcctgtgttaagtcattttatatggaaaggcttacaaatcaatattgtaagcattcattatttaagaatgtacaatgtatttgtgtaatttatagaagtaaaatctagatgttgagacctgtttggtctaatagatgtggatacagtttattttacttgaaattttgttgtctactttgtgtgtttaacgtaaatatatgtcagagtttagaatctgcctgcagttgtgaaaaagaaagcttaagtgatgcagttattggcaagattgcaatgattatggaaaaatagaaagcgaatactcagtttaagccaaggaaaatattgtggatttaatatttgataaaactgattttgtttaacaggaaatttttagcattcagtcatataacatctggttatcaatgcacgtttacacaataaatacttgagtggaggaaagttaaaaagatgagcaatagagtagaaaatatatcttaaactagttgacctagattgtattaatagctacttaagatgtttcaaagataggaagctattgcttggacagagaacttgaaataagtggacccatgtataaaagctttgacttaaacattgatatttcagaatgtgttaaatagattaagacacagtaagttaaccctacatgttataaagatggcgactgttaacaaaggctgtaacagattaagtactattttatatccagaaagtcttctctatgtagagaagtcagagagactagatgctttcactagggaatgtcttcccacccagccatcacaaatgtggacaatcactgcatccacatctgtaggcatatttctatggaagtttaattgacagctatattcattatttattttacaatttcatttttctacacctttgagatttatgaatgcagttttttcttaaaatttattttaacttgacagtatgtttttagttcccccaatttaattaatggaccatgtgcatatatatgggagtgtgcttacatgttaataatttacttgcatacttatgagaatttcacattggaattcataatggtaaaacaacatacatctgccaatatacgttttttctgttggtttaagagaagataactgacagctttacctacttcctacagatgcatctaaacccagatattactgagaagagtgtattgactctgagtgtaagagagtatgtgtttttttgtttttagttctgctctagatcataattgtaaaaaatattaagtcataatctgttacactaaaatttgtcagccaaatgttagatgaaatgtctgcactgtagtctcagatcactgtcacgtatataaattgcttcttcattttaatttgtagaagtactttacagtaggaaacgccagtaaacaacttttatactgttaaaaggcttttttccccttcctaaatgttttaattgtaccatagtgttttgctcactgaagaagcttcttatggaccttgcaactttgttgctagcttgaggttgattattgtggttgtattgttcactgtgtgtagaaatagtatgagtacgatttcaatagactgttcagtttttaatattagccatagcactggttagtatatctcagtagtttcatgaaacgtttcctgtattctaatctattttgaaacattttgtttttttttaattgtgtcttacagtcaagtttgtagattttcataagccacaattttaaaagatgcagtaatcttccaacttccaatatttatccattcgttgtggacccacagattgcatctttaaattcataataagtttccttaactatcttatgtttctagtctttcaagcttagtgataaggtggaagcacaagaaaaatttcagtagaatacagtttttattttgtaaacactaatgtattaaacttgctatacattaaagcaaataatatatatttttatttgaattgtatatgtgaattggaagttataattagttgattttttcattttgttagaggtattttcactgaacaaggtcaattggttacctcagtattacagccaatatagtccaagggaccatttctccccgagtctcttacactttattgtgcgatgtccacgtttttgtgactcttcaagctgttggtgaggtgggacgaatgcacttgcttcctgtggcaataaagattttctgtgcctcacaaaaaaaaaaaaaaaaaaaaaaaaaaaaaaa

SEQ ID NO: 216 - DNA, 2725 bp, Homo sapiens
  gene (1)..(2725): Accession No. NM_005967
ctctcccagtctctaagccgcggcgtctccgcggccgagaggccccagcgcccgcctccccggcccccgcccccacccccgcccccggctctgcccacgccctccgcccgccagcccggcagccagcgcagctccgggcctcgctccctgtgcgtcctgcgggggcggaggcgcggagaggcggcaagcgcagccggggagggtgggggggcagaggcacagacagaggcgcggaggctcggagagagaagacgtggagggagggacagagcctggacagcggtggacacggcatcgtgcgcggggaagagggcagcacgcagcaggcgccgagcgccgggcaccgagaagggcagcccgggtgatctccggccgtccatgcacagagcgccttcccccacagccgagcagccgccgggcggaggggacagcgcccgccggaccctgcagcccagactcaagcccagtgcccgagccatggcactgcctcggacgctgggggagctgcagctgtaccgggtcctgcagcgcgccaacctcctttcctactatgagaccttcatccagcagggaggggacgacgtgcagcagctgtgtgaggcgggtgaggaggagtttctggagatcatggcacttgtgggcatggccaccaagcccctccatgtccggcgcctgcagaaggcactgagagagtgggccaccaatccagggctcttcagtcaaccagtgcctgctgttcccgtctccagcatcccgctcttcaagatctctgagactgcgggtacccggaaagggagcatgagcaatgggcatggcagcccaggggaaaaggcaggcagtgcccgcagttttagccccaagagcccccttgaacttggagagaagctatcaccactgcctgggggacctggggcaggggacccccggatctggccaggccggagcactccagagtcggacgttggggcaggaggagaagaggaggctggctcgccccccttctccccccctgcagggggaggagtccctgaggggactggggctggggggctggcagcaggtgggactgggggtggtccagaccgactggagccagagatggtacgcatggtggtggaaagtgtggagaggatcttccggagcttcccaaggggggatgctggggaggtcacatccctgctaaagctgaataagaagctggcacggagcgttgggcacatctttgagatggatgataatgacagccagaaggaagaggagatccgcaaatacagcatcatctatggccgtttcgactctaagcggcgggagggcaagcagctcagcctgcacgagctcaccatcaacgaggctgctgcccagttctgcatgagggacaacacgctcttattacggagagtggagctcttctctttgtcccgccaagtagcccgagagagcacctacttgtcctccttgaagggctccaggcttcaccctgaagaactgggaggccctccactgaagaagctgaaacaagaggttggagaacagagtcaccctgaaatccagcagcctcccccaggccctgagtcctatgtacccccataccgccccagcctggaggaggacagcgccagcctgtctggggagagtctggatggacatttgcaggctgtggggtcatgtccaaggctgacgccgccccctgctgacctgcctctggcattgccagcccatgggctatggagccgacacatcctgcagcagacactgatggacgaggggctgcggctcgcccgcctcgtctcccacgaccgcgtgggccgcctcagcccctgtgtgcctgcgaagccacctctcgcagagttcgaggaagggctgctggacagatgtcctgccccaggaccccatcccgcgctggtggagggtcgcaggagcagcgtgaaagtggaggctgaggccagccggcagtgagggttggactggtgtcttcagacccaggacctcagacttctggctcacacagacccccacgctctccatccccggaatctagtcacaaccctggatccttcctctgcccttctcctgcctccccacctgctccatgggcataagactgtggggcttcaagcaataacaagcagaggcctggagagaggacacaaggagggtgcgtggtgccctcacccctgcccagagcgagggggcaaggactctgcctccagggcatctggggttttcccctccctcacacaacacactcccattctctttaggtttgcaccagtggtgtgagcagttggactcagtttggacaagggggaaagggggacttccctgggaaggtccagctaaaagtggcaacatttgcccccagaattgggggcctgggaacactggacctgctccttctcccctctccttccccgtttttgtgcttctggtttgtttctttaattaatttaacaagtgctgcagtttgccctcccattcccatctatcccccaagtcctttgcaatttcttccctgccctacataggggcggtgggtgtgggatcccttcactggccccctcgggaggcctgggttggactcagggtctcctccagctgggggctggaccgcagcacctatctgagcagttagagcgtctttcttttcagattgtgtacagtagattatttattttgttattttggaataaaatttattttatggcttaggaaaaaaaaaaaaaaa

SEQ ID NO: 217 - DNA, 3166 bp, Homo sapiens
  gene (1)..(3166): Accession No. NM_173091
agcaggaagctcgcgccgccgtcgccgccgccgctcagcttccccgggcgcgtccaggacccgctgcgccaggcgcgccgtccccggacccggcgtgcgtccctacgaggaaagggaccccgccgctcgagccgcctccgccagccccactgcgaggggtcccagagccagccgcgcccgccctcgcccccggccccgcagccttcccgccctgcgcgccatgaacgcccccgagcggcagccccaacccgacggcggggacgccccaggccacgagcctgggggcagcccccaagacgagcttgacttctccatcctcttcgactatgagtatttgaatccgaacgaagaagagccgaatgcacataaggtcgccagcccaccctccggacccgcataccccgatgatgtcctggactatggcctcaagccatacagcccccttgctagtctctctggcgagccccccggccgattcggagagccggatagggtagggccgcagaagtttctgagcgcggccaagccagcaggggcctcgggcctgagccctcggatcgagatcactccgtcccacgaactgatccaggcagtggggcccctccgcatgagagacgcgggcctcctggtggagcagccgcccctggccggggtggccgccagcccgaggttcaccctgcccgtgcccggcttcgagggctaccgcgagccgctttgcttgagccccgctagcagcggctcctctgccagcttcatttctgacaccttctccccctacacctcgccctgcgtctcgcccaataacggcgggcccgacgacctgtgtccgcagtttcaaaacatccctgctcattattcccccagaacctcgccaataatgtcacctcgaaccagcctcgccgaggacagctgcctgggccgccactcgcccgtgccccgtccggcctcccgctcctcatcgcctggtgccaagcggaggcattcgtgcgccgaggccttggttgccctgccgcccggagcctcaccccagcgctcccggagcccctcgccgcagccctcatctcacgtggcaccccaggaccacggctccccggctgggtacccccctgtggctggctctgccgtgatcatggatgccctgaacagcctcgccacggactcgccttgtgggatcccccccaagatgtggaagaccagccctgacccctcgccggtgtctgccgccccatccaaggccggcctgcctcgccacatctacccggccgtggagttcctggggccctgcgagcagggcgagaggagaaactcggctccagaatccatcctgctggttccgcccacttggcccaagccgctggtgcctgccattcccatctgcagcatcccagtgactgcatccctccctccacttgagtggccgctgtccagtcagtcaggctcttacgagctgcggatcgaggtgcagcccaagccacatcaccgggcccactatgagacagaaggcagccgaggggctgtcaaagctccaactggaggccaccctgtggttcagctccatggctacatggaaaacaagcctctgggacttcagatcttcattgggacagctgatgagcggatccttaagccgcacgccttctaccaggtgcaccgaatcacggggaaaactgtcaccaccaccagctatgagaagatagtgggcaacaccaaagtcctggagatacccttggagcccaaaaacaacatgagggcaaccatcgactgtgcggggatcttgaagcttagaaacgccgacattgagctgcggaaaggcgagacggacattggaagaaagaacacgcgggtgagactggttttccgagttcacatcccagagtccagtggcagaatcgtctctttacagactgcatctaaccccatcgagtgctcccagcgatctgctcacgagctgcccatggttgaaagacaagacacagacagctgcctggtctatggcggccagcaaatgatcctcacggggcagaactttacatccgagtccaaagttgtgtttactgagaagaccacagatggacagcaaatttgggagatggaagccacggtggataaggacaagagccagcccaacatgctttttgttgagatccctgaatatcggaacaagcatatccgcacacctgtaaaagtgaacttctacgtcatcaatgggaagagaaaacgaagtcagcctcagcactttacctaccacccagtcccagccatcaagacggagcccacggatgaatatgaccccactctgatctgcagccccacccatggaggcctggggagccagccttactacccccagcacccgatggtggccgagtccccctcctgcctcgtggccaccatggctccctgccagcagttccgcacggggctctcatcccctgacgcccgctaccagcaacagaacccagcggccgtactctaccagcggagcaagagcctgagccccagcctgctgggctatcagcagccggccctcatggccgccccgctgtcccttgcggacgctcaccgctctgtgctggtgcacgccggctcccagggccagagctcagccctgctccacccctctccgaccaaccagcaggcctcgcctgtgatccactactcacccaccaaccagcagctgcgctgcggaagccaccaggagttccagcacatcatgtactgcgagaatttcgcaccaggcaccaccagacctggcccgcccccggtcagtcaaggtcagaggctgagcccgggttcctaccccacagtcattcagcagcagaatgccacgagccaaagagccgccaaaaacggacccccggtcagtgaccaaaaggaagtattacctgcgggggtgaccattaaacaggagcagaacttggaccagacctacttggatgatgttaatgaaattatcaggaaggagttttcaggacctcctgccagaaatcagacgtaaaagaagccattatagcaagacaccttctgtatctgacccctcggagccctccacagcccctcaccttctgtctcctttcatgttcatctcccagcccggagtccacacgcggatcaatgtatgggcactaagcggactctcacttaaggagctcgccacctccctcta

SEQ ID NO: 218 - DNA, 3546 bp, Homo sapiens
  gene (1)..(3546): Accession No. NM_006186
gctgacgcgcgctgacgcgcggagactttaggtgcatgttggcagcggcagcgcaagccacataaacaaaggcacattggcggccagggccagtccgcccggcggctcgcgcacggctccgcggtcccttttgcctgtccagccggccgcctgtccctgctccctccctccgtgaggtgtccgggttcccttcgcccagctctcccacccctacccgaccccggcgcccgggctcccagagggaactgcacttcggcagagttgaatgaatgaagagagacgcggagaactcctaaggaggagattggacaggctggactccccattgcttttctaaaaatcttggaaactttgtccttcattgaattacgacactgtccacctttaatttcctcgaaaacgcctgtaactcggctgaagccatgccttgtgttcaggcgcagtatgggtcctcgcctcaaggagccagccccgcttctcagagctacagttaccactcttcgggagaatacagctccgatttcttaactccagagtttgtcaagtttagcatggacctcaccaacactgaaatcactgccaccacttctctccccagcttcagtacctttatggacaactacagcacaggctacgacgtcaagccaccttgcttgtaccaaatgcccctgtccggacagcagtcctccattaaggtagaagacattcagatgcacaactaccagcaacacagccacctgcccccccagtctgaggagatgatgccgcactccgggtcggtttactacaagccctcctcgcccccgacgcccaccaccccgggcttccaggtgcagcacagccccatgtgggacgacccgggatctctccacaacttccaccagaactacgtggccactacgcacatgatcgagcagaggaaaacgccagtctcccgcctctccctcttctcctttaagcaatcgccccctggcaccccggtgtctagttgccagatgcgcttcgacgggcccctgcacgtccccatgaacccggagcccgccggcagccaccacgtggtggacgggcagaccttcgctgtgcccaaccccattcgcaagcccgcgtccatgggcttcccgggcctgcagatcggccacgcgtctcagctgctcgacacgcaggtgccctcaccgccgtcgcggggctccccctccaacgaggggctgtgcgctgtgtgtggggacaacgcggcctgccaacactacggcgtgcgcacctgtgagggctgcaaaggcttctttaagcgcacagtgcaaaaaaatgcaaaatacgtgtgtttagcaaataaaaactgcccagtggacaagcgtcgccggaatcgctgtcagtactgccgatttcagaagtgcctggctgttgggatggtcaaagaagtggttcgcacagacagtttaaaaggccggagaggtcgtttgccctcgaaaccgaagagcccacaggagccctctcccccttcgcccccggtgagtctgatcagtgccctcgtcagggcccatgtcgactccaacccggctatgaccagcctggactattccaggttccaggcgaaccctgactatcaaatgagtggagatgacacccagcatatccagcaattctatgatctcctgactggctccatggagatcatccggggctgggcagagaagatccctggcttcgcagacctgcccaaagccgaccaagacctgctttttgaatcagctttcttagaactgtttgtccttcgattagcatacaggtccaacccagtggagggtaaactcatcttttgcaatggggtggtcttgcacaggttgcaatgcgttcgtggctttggggaatggattgattccattgttgaattctcctccaacttgcagaatatgaacatcgacatttctgccttctcctgcattgctgccctggctatggtcacagagagacacgggctcaaggaacccaagagagtggaagaactgcaaaacaagattgtaaattgtctcaaagaccacgtgactttcaacaatggggggttgaaccgccccaattatttgtccaaactgttggggaagctcccagaacttcgtaccctttgcacacaggggctacagcgcattttctacctgaaattggaagacttggtgccaccgccagcaataattgacaaacttttcctggacactttacctttctaagacctcctcccaagcacttcaaaggaactggaatgataatggaaactgtcaagagggggcaagtcacatgggcagagatagccgtgtgagcagtctcagctcaagctgccccccatttctgtaaccctcctagcccccttgatccctaaagaaaacaaacaaacaaacaaaaactgttgctatttcctaacctgcaggcagaacctgaaagggcattttggctccggggcatcctggatttagaacatggactacacacaatacagtggtataaactttttattctcagtttaaaaatcagtttgttgttcagaagaaagattgctataatgtataatgggaaatgtttggccatgcttggttgttgcagttcagacaaatgtaacacacacacacatacacacacacacacacacacagagacacatcttaaggggacccacaagtattgccctttaacaagacttcaaagttttctgctgtaaagaaagctgtaatatatagtaaaactaaatgttgcgtgggtggcatgagttgaagaaggcaaaggcttgtaaatttacccaatgcagtttggctttttaaattattttgtgcctatttatgaataaatattacaaattctaaaagataagtgtgtttgcaaaaaaaaagaaaataaatacataaaaaagggacaagcatgttgattctaggttgaaaatgttataggcacttgctacttcagtaatgtctatattatataaatagtatttcagacactatgtagtctgttagattttataaagattggtagttatctgagcttaaacattttctcaattgtaaaataggtgggcacaagtattacacatcagaaaatcctgacaaaagggacacatagtgtttgtaacaccgtccaacattccttgtttgtaagtgttgtatgtaccgttgatgttgataaaaagaaagtttatatcttgattattttgttgtctaaagctaaacaaaacttgcatgcagcagcttttgactgtttccagagtgcttataatatacataactccctggaaataactgagcactttgaattttttttatgtctaaaattgtcagttaatttattattttgtttgagtaagaattttaatattgccatattctgtagtatttttctttgtatatttctagtatggcacatgatatgagtcactgcctttttttctatggtgtatgacagttagagatgctgattttttttctgataaattctttctttgagaaagacaattttaatgtttacaacaataaaccatgtaaatgaacagaaaaaaaaaaaaaaaaa

SEQ ID NO: 219 - DNA, 2809 bp, Homo sapiens
  gene (1)..(2809): Accession No. NM_002607
acgcgcgccctgcggagcccgcccaactccggcgagccgggcctgcgcctactcctcctcctcctctcccggcggcggctgcggcggaggcgccgactcggccttgcgcccgccctcaggcccgcgcgggcggcgcagcgaggccccgggcggcgggtggtggctgccaggcggctcggccgcgggcgctgcccggccccggcgagcggagggcggagcgcggcgccggagccgagggcgcgccgcggagggggtgctgggccgcgctgtgcccggccgggcggcggctgcaagaggaggccggaggcgagcgcggggccggcggtgggcgcgcagggcggctcgcagctcgcagccggggccgggccaggcgtccaggcaggtgatcggtgtggcggcggcggcggcggcggccccagactccctccggagttcttcttggggctgatgtccgcaaatatgcagaattaccggccgggtcgctcctgaagccagcgcggggagcgagcgcggcggcggccagcaccgggaacgcaccgaggaagaagcccagcccccgccctccgccccttccgtccccaccccctacccggcggcccaggaggctccccgcgctgcgggcgcgcactccctgtttctcctcctcctggctggcgctgcctgcctctccgcactcactgctcgcgccgggcgcgctccgccagctccgtgctccccgcgccaccctcctccgggccgcgctccctaagggatggtactgaatttcgccgccacaggagaccggctggagcgcccgccccgcggcctcgcctctcctccgagcagccagcgcctcgggacgcgatgaggaccttggcttgcctgctgctcctcggctgcggatacctcgcccatgttctggccgaggaagccgagatcccccgcgaggtgatcgagaggctggcccgcagtcagatccacagcatccgggacctccagcgactcctggagatagactccgtagggagtgaggattctttggacaccagcctgagagctcacggggtccatgccactaagcatgtgcccgagaagcggcccctgcccattcggaggaagagaagcatcgaggaagctgtccccgctgtctgcaagaccaggacggtcatttacgagattcctcggagtcaggtcgaccccacgtccgccaacttcctgatctggcccccgtgcgtggaggtgaaacgctgcaccggctgctgcaacacgagcagtgtcaagtgccagccctcccgcgtccaccaccgcagcgtcaaggtggccaaggtggaatacgtcaggaagaagccaaaattaaaagaagtccaggtgaggttagaggagcatttggagtgcgcctgcgcgaccacaagcctgaatccggattatcgggaagaggacacgggaaggcctagggagtcaggtaaaaaacggaaaagaaaaaggttaaaacccacctaaagcagccaaccagatgtgaggtgaggatgagccgcagccctttcctgggacatggatgtacatggcgtgttacattcctgaacctactatgtacggtgctttattgccagtgtgcggtctttgttctcctccgtgaaaaactgtgtccgagaacactcgggagaacaaagagacagtgcacatttgtttaatgtgacatcaaagcaagtattgtagcactcggtgaagcagtaagaagcttccttgtcaaaaagagagagagagaaagagagagagaaaacaaaaccacaaatgacaaaaacaaaacggactcacaaaaatatctaaactcgatgagatggagggtcgccccgtgggatggaagtgcagaggtctcagcagactggatttctgtccgggtggtcacaggtgcttttttgccgaggatgcagagcctgctttgggaacgactccagaggggtgctggtgggctctgcaggggcccgcaggaagcaggaatgtcttggaaaccgccacgcgaactttagaaaccacacctcctcgctgtagtatttaagcccatacagaaaccttcctgagagccttaagtggtttttttttttgtttttgttttgttttttttttttttgtttttttttttttttttttacaccataaagtgattattaagctttcctttttactctttggctagctttttttttttttttttttttttaattatctcttggatgacatttacaccgataacacacaggctgctgtaactgtcaggacagtgcgacggtatttttcctagcaagatgcaaactaatgagatgtattaaaataaacatggtatacctacctatgcatcatttcctaaatgtttctggctttgtgtttctcccttaccctgctttatttgttaatttaagccattttgaaagaactatgcgtcaaccaatcgtacgccgtccctgcggcacctgccccagagcccgtttgtggctgagtgacaacttgttccccgcagtgcacacctagaatgctgtgttcccacgcggcacgtgagatgcattgccgcttctgtctgtgttgttggtgtgccctggtgccgtggtggcggtcactccctctgctgccagtgtttggacagaacccaaattctttatttttggtaagatattgtgctttacctgtattaacagaaatgtgtgtgtgtggtttgtttttttgtaaaggtgaagtttgtatgtttacctaatattacctgttttgtatacctgagagcctgctatgttctttttttgttgatccaaaattaaaaaaaaaaataccaccaacaaaa

SEQ ID NO: 220 - DNA, 683 bp, Homo sapiens
  gene (1)..(683): Accession No. NM_014624
ctgcgcagatgaggggagactcgtcaccaggcgtgcagtgggcactgctgggctcccccatcccgtcctaacccggaacagccccgggcaggaggcgtggaaagtcgagggggtaaaccgcgaatgtgcgttgtgtaagccacggcgcagggtggggcgcgggcgggacttgggcgggcggggtgggcttggccgagctggcctccggggcaccgaccgctataaggccagtcggactgcgacacagcccatcccctcgaccgctcgcgtcgcatttggccgcctccctaccgctccaagcccagccctcagccatggcatgccccctggatcaggccattggcctcctcgtggccatcttccacaagtactccggcagggagggtgacaagcacaccctgagcaagaaggagctgaaggagctgatccagaaggagctcaccattggctcgaagctgcaggatgctgaaattgcaaggctgatggaagacttggaccggaacaaggaccaggaggtgaacttccaggagtatgtcaccttcctgggggccttggctttgatctacaatgaagccctcaagggctgaaaataaatagggaagatggagacaccctctgggggtcctctctgagtcaaatccagtggtgggtaattgtacaataaattttttttggtcaaattt

SEQ ID NO: 221 - DNA, 3004 bp, Homo sapiens
  gene (1)..(3004): Accession No. NM_000302
agtgcgtggcagcgggacctgcggccccgtcgcgaagtttccagccctgcgagcgccgccgggtcggccgatcgtcccccatacctcggccatgcggcccctgctgctactggccctgctgggctggctgctgctggccgaagcgaagggcgacgccaagccggaggacaaccttttagtcctcacggtggccactaaggagaccgagggattccgtcgcttcaagcgctcagctcagttcttcaactacaagatccaggcgcttggcctaggggaggactggaatgtggagaaggggacgtcggcaggtggagggcagaaggtccggctgctgaagaaagctctggagaagcacgcagacaaggaggatctggtcattctcttcgcagacagctatgacgtgctgtttgcatcggggccccgggagctcctgaagaagttccggcaggccaggagccaggtggtcttctctgctgaggagctcatctacccagaccgcaggctggagaccaagtatccggtggtgtccgatggcaagaggttcctgggctctggaggcttcatcggttatgcccccaacctcagcaaactggtggccgagtgggagggccaggacagcgacagcgatcagctgttttacaccaagatcttcttggacccggagaagagggagcagatcaatatcaccctggaccaccgctgccgtatcttccagaacctggatggagccttggatgaggtcgtgctcaagtttgaaatgggccatgtgagagcgaggaacctggcctatgacaccctcccggtcctgatccatggcaacgggccaaccaagctgcagttgaactacctgggcaactacatcccgcgcttctggaccttcgaaacaggctgcaccgtgtgtgacgaaggcttgcgcagcctcaagggcattggggatgaagctctgcccacggtcctggtcggcgtgttcatcgaacagcccacgccgtttgtgtccctgttcttccagcggctcctgcggctccactacccccagaaacacatgcgacttttcatccacaaccacgagcagcaccacaaggctcaggtggaagagttcctggcacagcatggcagcgagtaccagtctgtgaagctggtgggccctgaggtgcggatggcgaatgcagatgccaggaacatgggcgcagacctgtgccggcaggaccgcagctgcacctactacttcagcgtggatgctgacgtggccctgaccgagcccaacagcctgcggctgctgatccaacagaacaagaacgtcattgccccgctgatgacccggcatgggaggctgtggtcgaacttctggggggctctcagtgcagatggctactatgcccgttccgaggactacgtggacattgtgcaggggcggcgtgttggtgtctggaatgtgccctatatttcaaacatctacttgatcaagggcagtgccctgcggggtgagctgcagtcctcagatctcttccaccacagcaagctggaccccgacatggccttctgtgccaacatccggcagcaggatgtgttcatgttcctgaccaaccggcacacccttggccatctgctctccctagacagctaccgcaccacccacctgcacaacgacctctgggaggtgttcagcaaccccgaggactggaaggagaagtacatccaccagaactacaccaaagccctggcagggaagctggtggagacgccctgcccggatgtctattggttccccatcttcacggaggtggcctgtgatgagctggtggaggagatggagcactttggccagtggtctctgggcaacaacaaggacaaccgcatccagggtggctacgagaacgtgccgactattgacatccacatgaaccagatcggctttgagcgggagtggcacaaattcctgctggagtacattgcgcccatgacggagaagctctaccccggctactacaccagggcccagtttgacctggcctttgtcgtccgctacaagcctgatgagcagccctcactgatgccacaccatgatgcctccaccttcaccatcaacatcgccctgaaccgagtcggggtggattacgagggcgggggctgtcggttcctgcgctacaactgttccatccgagccccaaggaagggctggaccctcatgcaccctggacgactcacgcattaccatgaggggctccccaccaccaggggcacccgctacatcgcagtctccttcgtcgatccctaattggccaggcctgaccctcttggacctttcttctttgccgacaaccactgcccagcagcctctgggacctcggggtcccagggaacccagtccagcctcctggctgttgacttcccattgctcttggagccaccaatcaaagagattcaaagagattcctgcaggccagaggcggaacacacctttatggctggggctctccgtggtgttctggacccagcccctggagacaccattcacttttactgctttgtagtgactcgtgctctccaacctgtcttcctgaaaaaccaaggcccccttcccccacctcttccatggggtgagacttgagcagaacaggggcttccccaagttgcccagaaagactgtctgggtgagaagccatggccagagcttctcccaggcacaggtgttgcaccagggacttctgcttcaagttttggggtaaagacacctggatcagactccaagggctgccctgagtctgggacttctgcctccatggctggtcatgagagcaaaccgtagtcccctggagacagcgactccagagaacctcttgggagacagaagaggcatctgtgcacagctcgatcttctacttgcctgtggggaggggagtgacaggtccacacaccacactgggtcaccctgtcctggatgcctctgaagagagggacagaccgtcagaaactggagagtttctattaaaggtcatttaaacca

SEQ ID NO: 222 - DNA, 6256 bp, Homo sapiens
  gene (1)..(6256): Accession No. NM_005902
gcggccgccgcctccgccccgcgttcggggccttcccgaccctgcactgctgccgtccgcccgcccggccgctcttctcttcgccgtgggagccgctccgggcgcagggccgcgcgccgagccccgcaggctgcagcgccgcggcccggcccggcgccccggcaacttcgccgagagttgaggcgaagtttgggcgaccgcggcaggccccggccgagctcccctctgcgcccccggcgtcccgtcgagcccagccccgccgggggcgctcctcgccgcccgcgcgccctccccagccatgtcgtccatcctgcctttcactcccccgatcgtgaagcgcctgctgggctggaagaagggcgagcagaacgggcaggaggagaaatggtgcgagaaggcggtcaagagcctggtcaagaaactcaagaagacggggcagctggacgagctggagaaggccatcaccacgcagaacgtcaacaccaagtgcatcaccatccccaggtccctggatggccggttgcaggtgtcccatcggaaggggctccctcatgtcatctactgccgcctgtggcgatggccagacctgcacagccaccacgagctacgggccatggagctgtgtgagttcgccttcaatatgaagaaggacgaggtctgcgtgaatccctaccactaccagagagtagagacaccagttctacctcctgtgttggtgccacgccacacagagatcccggccgagttccccccactggacgactacagccattccatccccgaaaacactaacttccccgcaggcatcgagccccagagcaatattccagagaccccaccccctggctacctgagtgaagatggagaaaccagtgaccaccagatgaaccacagcatggacgcaggttctccaaacctatccccgaatccgatgtccccagcacataataacttggacctgcagccagttacctactgcgagccggccttctggtgctccatctcctactacgagctgaaccagcgcgtcggggagacattccacgcctcgcagccatccatgactgtggatggcttcaccgacccctccaattcggagcgcttctgcctagggctgctctccaatgtcaacaggaatgcagcagtggagctgacacggagacacatcggaagaggcgtgcggctctactacatcggaggggaggtcttcgcagagtgcctcagtgacagcgctatttttgtccagtctcccaactgtaaccagcgctatggctggcacccggccaccgtctgcaagatcccaccaggatgcaacctgaagatcttcaacaaccaggagttcgctgccctcctggcccagtcggtcaaccagggctttgaggctgtctaccagttgacccgaatgtgcaccatccgcatgagcttcgtcaaaggctggggagcggagtacaggagacagactgtgaccagtaccccctgctggattgagctgcacctgaatgggcctttgcagtggcttgacaaggtcctcacccagatgggctccccaagcatccgctgttccagtgtgtcttagagacatcaagtatggtaggggagggcaggcttggggaaaatggccatgcaggaggtggagaaaattggaactctactcaacccattgttgtcaaggaagaagaaatctttctccctcaactgaaggggtgcacccacctgttttctgaaacacacgagcaaacccagaggtggatgttatgaacagctgtgtctgccaaacacatttaccctttggccccactttgaagggcaagaaatggcgtctgctctggtggcttaagtgagcagaacaggtagtattacaccaccggccccctccccccagactctttttttgagtgacagctttctgggatgtcacagtccaaccagaaacacccctctgtctaggactgcagtgtggagttcaccttggaagggcgttctaggtaggaagagcccgcagggccatgcagacctcatgcccagctctctgacgcttgtgacagtgcctcttccagtgaacattcccagcccagccccgccccgccccgccccaccactccagcagaccttgccccttgtgagctggatagacttgggatggggagggagggagttttgtctgtctccctcccctctcagaacatactgattgggaggtgcgtgttcagcagaacctgcacacaggacagcgggaaaaatcgatgagcgccacctctttaaaaactcacttacgtttgtcctttttcactttgaaaagttggaaggatctgctgaggcccagtgcatatgcaatgtatagtgtctattatcacattaatctcaaagagattcgaatgacggtaagtgttctcatgaagcaggaggcccttgtcgtgggatggcatttggtctcaggcagcaccacactgggtgcgtctccagtcatctgtaagagcttgctccagattctgatgcatacggctatattggtttatgtagtcagttgcattcattaaatcaactttatcatatgctcttttaaatgtttggtttatatattttctttaaaaatcctgggctggcacattgactgggaaacctgagtgagacccagcaactgcttctctcccttctctctcctgaggtgaagcttttccaggttttgttgaagagatacctgccagcacttctgcaagctgaaatttacagaagcaaattcaccagaagggaaacatctcaggccaacataggcaaatgaaaagggctattaaaatatttttacacctttgaaaattgcaggcttggtacaaagaggtctgtcatcttccccctgggatataagatgatctagctcccggtagaggatcaccggtgacaactatagcagttgtattgtgtaacaagtactgctcccagcagcaattagggagaaaactagtctaaattatttcaactggaaaaaagaaaaaagagtcctcttcttttcccagccttttgcagaacacagtagacagaactgccaccttcaattggtactttattctttgctgctgtttttgtataaaatgacctatcccacgtttttgcatgaatttatagcaggaaaaatcaagggatttcctatggaagtcctgctttattccaggtgaagggaaggaagtgtatatacttttggcaagtcatacagctcaaatgtgatgagatttctgatgttagagggagatggagaggcttcctgatgcctcatctgcagggtcctgtgcctctgaagttctagccatgaggtttccaggtaggacagctgctccccaagcctcctgaggacacaggaagagacggaaggagcaccttgacagacttgtgtgagtcttctcgaaggagggttgactcagaacccagagacaatacaaaacccctcacttcctctgagagggccaaatgctgtgagtctgaagtatgtgcctggtgtgaaatgatctatggcctgtttcttacacaggaagccccctgaacctcctgtacatgtgttcatgttcccagccagctctgagacccaggaaccaaatattccattttggcttctgctagagcagtcatggttcctctcctaaaagccatgggcagcagtttccgagggcctgcatgatccacctgctgcacgatcctatgagggcttcctgtggcacacagccctctgggtgcttgggaactagcttcaggcacagcctgattctggtgatccagtgatctatggaagtcgtgtcttactccaggtgaagggggaaaaaaaaagcctatactttggcaggttatgaactttgaatgtgatgaaatgacacgtttggctgcatttggatggtgtcttagaaccctcattgctcagacctgaaggctacttctaggagcatgaagtttgagttttgtgtttttccaaaggatacttccttggccctttttctttattgactagaccaccagaggaggatgtgtgggattgtaggcaaacccacctgtggcatcactgaaaataaatttgatcatacctaagaggttaggaaatggtgccattcccaccttagagtgctacataggtgctttgggcgtatgtaacattagtgtccttccttgaagccacaagctagttttcttagttttaaaatcctgttgtatgaatggcatttgtatattaaaacacttttttaaaggacagttgaaaagggcaagaggaaaccagggcagttctagaggagtgctggtgactggatagcagttttaagtggcgttcacctagtcaacacgaccgcgtgtgttgcccctgccctgggctccccgccatgacatcttcaccttgcagcttgtgctgagactgacccaagtgcagctagcactgggacacagatccttgtcttcagcaccttccaaggagccaacttttattccctttcctctctcccctccccacctcgcttcttcccaatttagtaacttagatgcttccagcacatacgtaggtagctaccccagccggtttggattacaggcctgtgctggaacatcatctcagttggccaccttcctggcaggctgtagacctgacattttgagacaagcctagagtcaggagcagggactttgactcttaggaagagcacacatgagggcaaggctgctggcagacgtctccattgtccttatgttgtctgtgttgtatttttttttttttattgaccatggtgattatttttttaaaccatcgttaatatactgaagtgagctatagcacatatcatgtgcttagtttgtttatttttctccatctccccttggcttcctagagtttggacatattccaggctaaatgcttttactcaagactacagaaaggtttgaagtagtgtgtgcatggcatgcacgtatgtaagtaatctggggaagaagcaaagatctgtttcattcttagcctcaggcctcatgagggtctccacagggccggagctcaggttacaccactccttcgtccttacaggagatgtagggagaagaatctgcaggctgcttgtaggactgttcaccaagggggataccagcagcaagagagtgcacccgtttagccctggaccctgtttcttactgtgtgacttggctagagttgggagttcccccaaaataaacgtgtccccattttaccagaaccaaacctcaacacagcgaagctgtactgtctttgtgtggcaaagatgttcccttgtaggcccctttcaggtaaccgtcttcacaatgtattttcatcacagtttaaggagcatcagccgcttctcaagtgggtagggaaagcagaaaaacgtacgcaagaggacatggatccaaaatgatgatgaagcatctcccatggggaggtgatggtggggagatgatgggctaaacaggcaacttttcaaaaacacagctatcatagaaaagaaacttgcctcatgtaaactggattgagaaattctcagtgattctgcaatggatttttttttaatgcagaagtaatgtatactctagtattctggtgtttttatatttatgtaataatttcttaaaaccattcagacagataactatttaattttttttaagaaagttggaaaggtctctcctcccaaggacagtggctggaagagttggggcacagccagttctgaatgttggtggagggtgtagtggctttttggctcagcatccagaaacaccaaaccaggctggctaaacaagtggccgcgtgtaaaaacagacagctctgagtcaaatctgggcccttccacaagggtcctctgaaccaagccccactcccttgctaggggtgaaagcattacagagagatggagccatctatccaagaagccttcactcaccttcactgctgctgttgcaactcggctgttctggactctgatgtgtgtggagggatggggaatagaacattgactgtgttgattaccttcactattcggccagcctgaccttttaataactttgtaaaaagcatgtatgtatttatagtgttttagatttttctaacttttatatcttaaaagcagagcacctgtttaagcattgtacccctattgttaaagatttgtgtcctctcattccctctcttcctcttgtaagtgcccttctaataaacttttcatggaaaagctcctgtgccaggagctcagtctgaaaaaaaaaaaaaaaaaaaaaaaaa

SEQ ID NO: 223 - DNA, 5378 bp, Homo sapiens
  gene (1)..(5378): Accession No. NM_007027
ggggtaggggcggcgccgagtcgggggagggggctgtgcgccgggctggcgcccgaccccagccaccgccctgcggccagcgcgtcccccgactcgccgcccggagaccccgaggctccaacgagttcagaaatgtccagaaatgacaaagaaccgttttttgtgaagtttttaaagtcttcagacaattccaaatgtttttttaaagctctcgagtccataaaagaattccaatcagaagaatatcttcagattattacagaagaagaggcattgaagataaaggagaatgatagatcactttatatctgtgacccttttagtggcgttgtctttgatcacctcaaaaagcttggctgcagaattgttggtcctcaagtagtcatattttgtatgcaccaccagcgatgtgtcccaagagccgaacatccagtttataatatggttatgtctgatgtaaccatatcttgtacaagtctggaaaaagaaaaaagggaagaagttcataaatatgtacaaatgatgggcggacgagtatacagagaccttaatgtatcagtaactcaccttattgcaggagaagttggtagcaaaaaatatttagttgctgcaaacctgaagaaacctattttgcttccctcttggataaaaacactttgggagaagtcacaagagaaaaaaataactagatatactgatataaacatggaagatttcaagtgtcctatttttcttggttgcataatctgtgtgactggcttatgtggcttagacaggaaagaagttcagcaactcacagttaagcatggaggtcaatacatgggacaattgaaaatgaatgaatgtacacacctcattgtgcaagaaccaaaaggtcagaagtatgagtgtgccaagagatggaatgtacactgtgtgaccacacagtggttttttgacagtattgagaaaggtttttgtcaggatgaatccatatacaagacagaacctagaccagaagcaaagactatgcccaattcttcaactcctaccagccagatcaacacaattgatagtcgtactctttcagatgtcagcaatatttccaacataaatgcaagttgcgtaagtgaatcaatatgtaattcacttaacagcaaactggagcctacacttgaaaatctagaaaatctggatgtcagtgcatttcaagcacctgaagatttattagatggttgtcggatatatctttgcggttttagtggcagaaagctagataaactgagaagacttattaacagtggaggtggagttcgttttaaccagctaaatgaagatgtaactcatgttattgtgggagattatgatgatgaattgaagcagttttggaataaatcagcccacaggcctcatgtagtgggagcaaagtggttgctagagtgtttcagtaaaggttatatgctttctgaagaaccatatatccatgctaattaccagccagtggaaattccagtttcacataagcctgaaagtaaagcagctcttttaaaaaagaagaacagcagcttctctaagaaagactttgctcctagtgaaaagcatgagcaagctgatgaagatctgctctctcaatatgaaaatggtagctccacagtagttgaggctaagacgtctgaagccaggccctttaatgattctactcatgctgagcccttgaatgattctactcacatttctttgcaagaagaaaaccagtcttctgtcagtcattgtgtccctgatgtttctacaattactgaagaaggcttatttagccaaaagagtttccttgttttgggttttagtaatgaaaatgaatctaacatcgcaaacatcataaaagaaaatgctgggaaaatcatgtcccttctgagcagaactgttgcggattatgctgtggttcctctgctggggtgtgaagtggaagccactgtgggagaagttgttacaaatacatggctggttacttgcatagactatcagactttgtttgatccaaagtcgaatcctctcttcacaccagttccagtaatgacaggaatgactcctttagaggattgtgttatttcatttagccagtgtgctggagcagaaaaagagtctttaacattcctagcaaacctccttggagcaagtgttcaagaatactttgttcgcaaatccaatgcaaagaaaggcatgtttgccagtactcatcttatactgaaagaacgtggtggctctaaatatgaagctgcaaagaagtggaatttacctgccgttactatagcttggctgttggagactgctagaacgggaaagagagcagacgaaagccattttctgattgaaaattcaactaaagaagaacgaagtttggaaacagaaataacaaatggaatcaatctaaattcagatactgcagagcatcctggcacacgcctgcaaactcacagaaaaaccgtcgttacacctttagatatgaaccgctttcagagtaaagctttccgtgctgtggtctcacaacatgccagacaggtcgcagcctccccagcagtaggacaaccacttcagaaggagccctcgttacacctggatacaccatcaaaattcctgtccaaggacaaactcttcaagccttcctttgatgtgaaggatgcacttgcagccttggaaactccaggacgtcccagccaacagaaaaggaaaccgagtacgccactctcagaagttattgtcaaaaacttgcaacttgctttggcaaatagctctcgaaatgctgtcgctctttctgccagccctcaactgaaagaggcccagtcagagaaggaagaagccccaaagccacttcacaaagtagtggtatgtgttagtaaaaaactcagtaagaagcagagtgaactaaatgggatcgcagcctctctaggagcagattacaggtggagttttgatgaaacagtgactcatttcatctatcaagggcggccaaatgacactaatcgggagtataaatctgtaaaagaaagaggagtacacattgtttccgagcactggcttttagattgtgcccaagagtgtaaacatcttcctgaatctctttatccacatacttataatcccaaaatgagcttggatatcagcgcagtgcaagatggccggctctgtaatagtcgactactctcagctgtgtcttcaacaaaggatgatgagccagatcctttgattttagaagaaaatgatgtagacaatatggccaccaataataaagagtcagcaccatcaaatggaagtggaaagaatgactctaaaggagttctgacacagaccttagagatgagagagaactttcagaagcagttacaggagataatgtctgcaacatcaatagtgaaaccccaagggcagaggacttccctttcaagaagtggttgtaacagcgcatcttcaacccctgacagcactcgctctgctcgcagtggacgaagtagagtcctagaggcactgaggcagtctcgtcagacagtacctgatgtcaacacagagccttcccaaaatgaacagatcatttgggatgaccctacagcaagggaggagagagcaaggcttgccagcaatttgcagtggcctagttgtcccacacaatactctgagcttcaggttgacattcaaaacttggaggattctccttttcaaaagcctttacatgattcagaaattgctaaacaggctgtctgtgatcctggaaacatacgtgtgactgaagctcccaaacacccaatctctgaagaactggaaactcccataaaagacagccacctgatccctacgcctcaagcccccagtattgcctttccactcgccaacccccctgtggctccgcaccctagagaaaagattataacgatagaggagactcatgaagaattaaaaaaacagtacatatttcagttatcatctctgaatcctcaagaacgtattgactattgtcatctgattgagaaactaggtggattggtgatagaaaagcagtgctttgatcccacctgtacacacattgttgtgggacatccacttcgaaacgagaagtatttagcctcagtggcagctgggaagtgggtgcttcatcgctcctaccttgaagcctgcaggactgctggacacttcgtgcaggaagaagactatgaatggggaagtagttccatacttgatgttctgactggaatcaatgtacagcaacgaagactagcacttgcagcaatgagatggagaaaaaaaatccagcaaagacaagaatctggcattgttgagggagcatttagtgggtggaaggttattttacatgtggatcagtctcgagaagcaggcttcaaacgccttcttcagtcaggaggagcaaaggtgctacctggtcattctgtacctttatttaaagaggccacacatcttttttctgacttgaataaactgaaaccagatgactcaggagttaatatagcagaagctgctgcccagaacgtgtactgcttgagaacagaatacattgctgattatctcatgcaggaatcacctcctcatgtagaaaattactgtctaccagaagctatttcatttattcagaataataaggaacttgggactggattatcacaaaagaggaaagctcctacagaaaaaaataaaatcaaacgacctagagtacactaatcgcatctaccctttagttaccaaacattaaatgtttttaaaaattgaaagcctgaatgtgactgtgatagatttgggtagtaatttaaagatgagtacctgaagaattctgcttcagagtataatgatgacccttcttgagttttgaacacctgaaattgtaatcactgaaatattaactgtttcttaataaaaagttacctgaaataacaacaaaatacaactcctcagctagcttgctgttaaaccacattgaagtctgttaaaagatatttatttttcttgtaaatatctgaagctgtagcttagtggaaattttagcaaggtaatggattttgctttaaaatgtctgccttacaaattcataacaacaagatttgtcagtcagcatttattcatgttttccctgatttttatcttctcaccattttacctcttttaacaggagcctgagcacaaggtttaatgaggaagctggggctataaatatgtgtgtatatatgtatatgtatgtttgtacaaatctccatgatgtttgccaagtttgaatgcgcaaaacttggaaaatgtgacaataaagaataaaagtagtaactcaaattagtattaagatgtgtttacatagataaattttttaaaagagcaaaaaaaaaaaaaaaaaaaaaaaaaaaaaaaaa

SEQ ID NO: 224 - DNA, 2755 bp, Homo sapiens; identical to SEQ ID NO: 156
  gene (1)..(2755): Accession No. NM_000043

SEQ ID NO: 225 - DNA, 3223 bp, Homo sapiens
  gene (1)..(3223): Accession No. NM_001099
tcaatcccttaattaaatagcttcccctctacaggcttttgaagtggtagcagttcctcctaactcctgccagaaacagctctcctcaacatgagagctgcacccctcctcctggccagggcagcaagccttagccttggcttcttgtttctgctttttttctggctagaccgaagtgtactagccaaggagttgaagtttgtgactttggtgtttcggcatggagaccgaagtcccattgacacctttcccactgaccccataaaggaatcctcatggccacaaggatttggccaactcacccagctgggcatggagcagcattatgaacttggagagtatataagaaagagatatagaaaattcttgaatgagtcctataaacatgaacaggtttatattcgaagcacagacgttgaccggactttgatgagtgctatgacaaacctggcagccctgtttcccccagaaggtgtcagcatctggaatcctatcctactctggcagcccatcccggtgcacacagttcctctttctgaagatcagttgctatacctgcctttcaggaactgccctcgttttcaagaacttgagagtgagactttgaaatcagaggaattccagaagaggctgcacccttataaggattttatagctaccttgggaaaactttcaggattacatggccaggacctttttggaatttggagtaaagtctacgaccctttatattgtgagagtgttcacaatttcactttaccctcctgggccactgaggacaccatgactaagttgagagaattgtcagaattgtccctcctgtccctctatggaattcacaagcagaaagagaaatctaggctccaagggggtgtcctggtcaatgaaatcctcaatcacatgaagagagcaactcagataccaagctacaaaaaactcatcatgtattctgcgcatgacactactgtgagtggcctacagatggcgctagatgtttacaacggactccttcctccctatgcttcttgccacttgacggaattgtactttgagaagggggagtactttgtggagatgtactatcggaatgagacgcagcacgagccgtatcccctcatgctacctggctgcagccccagctgtcctctggagaggtttgctgagctggttggccctgtgatccctcaagactggtccacggagtgtatgaccacaaacagccatcaaggtactgaagacagtacagattagtgtgcacagagatctctgtagaaggagtagctgccctttctcagggcagatgatgctttgagaacatactttggccattacccccagctttgaggaaaatgggctttggatgattattttatgttttagggacccccaacctcaggcaattcctacctcttcacctgaccctgcccccacttgccataaaacttagctaagttttgttttgtttttcagcgttaatgtaaaggggcagcagtgccaaaatataatcagagataaagcttaggtcaaagttcatagagttcccatgaactatatgactggccacacaggatcttttgtatttaaggattctgagattttgcttgagcaggattagataaggctgttctttaaatgtctgaaatggaacagatttcaaaaaaaaaccccacaatctaggatgggaacaaggaaggaaagatgtgaataggctgatgggcaaaaaaccaatttacccatcagttccagccttctctcaaggagaggcaaagaaaggagatacagtggagacatctggaaagttttctccactggaaaactgctactatctgtttttatatttctgttaaaatatatgaggctacagaactaaaaattaaaacctctttgtgtcccttggtcctggaacatttatgttccttttaaagaaacaaaaatcaaactttacagaaagatttgatgtatgtaatacatatagcagctcttgaagtatatatatcatagcaaataagtcatctgatgagaacaagctatttgggcacaacacatcaggaaagagagcaccacgtgatggagtttctctagaagctccagtgataagagatgttgactctaaagttgatttaaggccaggcatggtggtttacgcctataatcccagcattttgggagtccgaggtgggcagatcacttgagctcaggaggtcaagatcagcctgggcaacatggtgaaacctggtctctacataaaatacaaaaacttagatgggcatggtggtgtgtgcctatagtcccactacttgtggggctaaggcaggaggatcacttgagccccggaggtcgaggctacagtgagccaagagtgcactactgtactccagccagggcaagagagcgagaccctgtctcaataaataaataaataaataaataaataaataaataaataaataaaaacaaagttgattaagaaaggaagtataggccaggcacagtggctcacacctgtaatccttgcattttggaaggctgaggcaggaggatcactttaggcctggtgtgttcaagaccagcctggtcaacatagtgagacactgtctctaccaaaaaaaggaaggaagggacacatatcaaactgaaacaaaattagaaatgtaattatgttctaagtgcctccaagttcaaaacttattggaatgttgagagtgtggttacgaaatacgttaggaggacaaaaggaatgtgtaagtctttaatgccgatatcttcagaaaacctaagcaaacttacaggtcctgctgaaactgcccactctgcaagaagaaatcatgatatagctttgccatgtggcagatctacatgtctagagaacactgtgctctattaccattatggataaagatgagatggtttctagagatggtttctactggctgccagaatctagagcaaagccatccccgctcctggttggtcacagaatgactgacaaagacatcgattgatatgcttctttgtgttatttccctcccaagtaaatgtttgtccttgggtccattttctatgcttgtaactgtcttctagcagtgagccaaatgtaaaatagtgaataaagtcattattaggaagttcaaaagcattgcttttataatgaacttagaaaaacgtatgtgtgtgtgtttaattagaataaaattcctctaggcagatttcaggagctccaaaa

SEQ ID NO: 226 - DNA, 4786 bp, Homo sapiens
  gene (1)..(4786): Accession No. NM_018685
ctcggcgctgaaattcaaatttgaacggctgcagaggccgagtccgtcactggaagccgagaggagaggacagctggttgtgggagagttcccccgcctcagactcctggttttttccaggagacacactgagctgagactcacttttctcttcctgaatttgaaccaccgtttccatcgtctcgtagtccgacgcctggggcgatggatccgtttacggagaaactgctggagcgaacccgtgccaggcgagagaatcttcagagaaaaatggctgagaggcccacagcagctccaaggtctatgactcatgctaagcgagctagacagccactttcagaagcaagtaaccagcagcccctctctggtggtgaagagaaatcttgtacaaaaccatcgccatcaaaaaaacgctgttctgacaacactgaagtagaagtttctaacttggaaaataaacaaccagttgagtcgacatctgcaaaatcttgttctccaagtcctgtgtctcctcaggtgcagccacaagcagcagataccatcagtgattctgttgctgtcccggcatcactgctgggcatgaggagagggctgaactcaagattggaagcaactgcagcctcctcagttaaaacacgtatgcaaaaacttgcagagcaacggcgccgttgggataatgatgatatgacagatgacattcctgaaagctcactcttctcaccaatgccatcagaggaaaaggctgcttcccctcccagacctctgctttcaaatgcctcggcaactccagttggcagaaggggccgtctggccaatcttgctgcaactatttgctcctgggaagatgatgtaaatcactcatttgcaaaacaaaacagtgtacaagaacagcctggtaccgcttgtttatccaaattttcctctgcaagtggagcatctgctaggatcaatagcagcagtgttaagcaggaagctacattctgttcccaaagggatggcgatgcctctttgaataaagccctatcctcaagtgctgatgatgcgtctttggttaatgcctcaatttccagctctgtgaaagctacttctccagtgaaatctactacatctatcactgatgctaaaagttgtgagggacaaaatcctgagctacttccaaaaactcctattagtcctctgaaaacgggggtatcgaaaccaattgtgaagtcaactttatcccagacagttccatccaagggagaattaagtagagaaatttgtctgcaatctcaatctaaagacaaatctacgacaccaggaggaacaggaattaagcctttcctggaacgctttggagagcgttgtcaagaacatagcaaagaaagtccagctcgtagcacaccccacagaacccccattattactccaaatacaaaggccatccaagaaagattattcaagcaagacacatcttcatctactacccatttagcacaacagctcaagcaggaacgtcaaaaagaactagcatgtcttcgtggccgatttgacaagggcaatatatggagtgcagaaaaaggcggaaactcaaaaagcaaacaactagaaaccaaacaggaaactcactgtcagagcactcccctcaaaaaacaccaaggtgtttcaaaaactcagtcacttccagtaacagaaaaggtgaccgaaaaccagataccagccaaaaattctagtacagaacctaaaggtttcactgaatgcgaaatgacgaaatctagccctttgaaaataacattgtttttagaagaggacaaatccttaaaagtaacatcagacccaaaggttgagcagaaaattgaagtgatacgtgaaattgagatgagtgtggatgatgatgatatcaatagttcgaaagtaattaatgacctcttcagtgatgtcctagaggaaggtgaactagatatggagaagagccaagaggagatggatcaagcattagcagaaagcagcgaagaacaggaagatgcactgaatatctcctcaatgtctttacttgcaccattggcacaaacagttggtgtggtaagtccagagagtttagtgtccacacctagactggaattgaaagacaccagcagaagtgatgaaagtccaaaaccaggaaaattccaaagaactcgtgtccctcgagctgaatctggtgatagccttggttctgaagatcgtgatcttctttacagcattgatgcatatagatctcaaagattcaaagaaacagaacgtccatcaataaagcaggtgattgttcggaaggaagatgttacttcaaaactggatgaaaaaaataatgcctttccttgtcaagttaatatcaaacagaaaatgcaggaactcaataacgaaataaatatgcaacagacagtgatctatcaagctagccaggctcttaactgctgtgttgatgaagaacatggaaaagggtccctagaagaagctgaagcagaaagacttcttctaattgcaactgggaagagaacacttttgattgatgaattgaataaattgaagaacgaaggacctcagaggaagaataaggctagtccccaaagtgaatttatgccatccaaaggatcagttactttgtcagaaatccgcttgcctctaaaagcagattttgtctgcagtacggttcagaaaccagatgcagcaaattactattacttaattatactaaaagcaggagctgaaaatatggtagccacaccattagcaagtacttcaaactctcttaacggtgatgctctgacattcactactacatttactctgcaagatgtatccaatgactttgaaataaatattgaagtttacagcttggtgcaaaagaaagatccctcaggccttgataagaagaaaaaaacatccaagtccaaggctattactccaaagcgactcctcacatctataaccacaaaaagcaacattcattcttcagtcatggccagtccaggaggtcttagtgctgtgcgaaccagcaacttcgcccttgttggatcttacacattatcattgtcttcagtaggaaatactaagtttgttctggacaaggtcccctttttatcttctttggaaggtcatatttatttaaaaataaaatgtcaagtgaattccagtgttgaagaaagaggttttctaaccatatttgaagatgttagtggttttggtgcctggcatcgaagatggtgtgttctttctggaaactgtatatcttattggacttatccagatgatgagaaacgcaagaatcccataggaaggataaatctggctaattgtaccagtcgtcagatagaaccagccaacagagaattttgtgcaagacgcaacacttttgaattaattactgtccgaccacaaagagaagatgaccgagagactcttgtcagccaatgcagggacacactctgtgttaccaagaactggctgtctgcagatactaaagaagagcgggatctctggatgcaaaaactcaatcaagttcttgttgatattcgcctctggcaacctgatgcttgctacaaacctattggaaagccttaaaccgggaaatttccatgctatctagaggtttttgatgtcatcttaagaaacacacttaagagcatcagatttactgattgcattttatgctttaagtacgaaagggtttgtgccaatattcactacgtattatgcagtatttatatcttttgtatgtaaaactttaactgatttctgtcattcatcaatgagtagaagtaaatacattatagttgattttgctaaatcttaatttaaaagcctcattttcctagaaatctaattattcagttattcatgacaatatttttttaaaagtaagaaattctgagttgtcttcttggagctgtaggtcttgaagcagcaacgtctttcaggggttggagacagaaacccattctccaatctcagtagttttttcgaaaggctgtgatcatttattgatcgtgatatgacttgttactagggtactgaaaaaaatgtctaaggcctttacagaaacatttttagtaatgaggatgagaactttttcaaatagcaaatatatattggcttaaagcatgaggctgtcttcagaaaagtgatgtggacataggaggcaatgtgtgagacttgggggttcaatattttatatagaagagttaataagcacatggtttacatttactcagctactatatatgcagtgtggtgcacattttcacagaattctggcttcattaagatcattatttttgctgcgtagcttacagacttagcatattagttttttctactcctacaagtgtaaattgaaaaatctttatattaaaaaagtaaactgttatgaagctgctatgtactaataatactttgcttgccaaagtgtttgggttttgttgttgtttgtttgtttgtttgtttttggttcatgaacaacagtgtctagaaacccattttgaaagtggaaaattattaagtcacctatcacctttaaacgcctttttttaaaattataaaatattgtaaagcagggtctcaacttttaaatacactttgaacttcttctctgaattattaaagttctttatgacctcatttataaacactaaattctgtcacctcctgtcattttattttttattcattcaaatgtattttttcttgtgcatattataaaaatatattttatgagctcttactcaaataaatacctgtaaatgtctaaaggaaaaaaaaaaaaaaaaaa

SEQ ID NO: 227 - DNA, 2448 bp, Homo sapiens
  gene (1)..(2448): Accession No. NM_005581
ggccgagctgcagcccgggctcagtctccgccgccgccgtgaacatggagcccccggacgcaccggcccaggcgcgcggggccccgcggctgctgttgctcgcagtcctgctggcggcgcacccagatgcccaggcggaggtgcgcttgtctgtacccccgctggtggaggtgatgcgaggaaagtctgtcattctggactgcacccctacgggaacccacgaccattatatgctggaatggttccttaccgaccgctcgggagctcgcccccgcctagcctcggctgagatgcagggctctgagctccaggtcacaatgcacgacacccggggccgcagtcccccataccagctggactcccaggggcgcctggtgctggctgaggcccaggtgggcgacgagcgagactacgtgtgcgtggtgagggcaggggcggcaggcactgctgaggccactgcgcggctcaacgtgtttgcaaagccagaggccactgaggtctcccccaacaaagggacactgtctgtgatggaggactctgcccaggagatcgccacctgcaacagccggaacgggaacccggcccccaagatcacgtggtatcgcaacgggcagcgcctggaggtgcccgtagagatgaacccagagggctacatgaccagccgcacggtccgggaggcctcgggcctgctctccctcaccagcaccctctacctgcggctccgcaaggatgaccgagacgccagcttccactgcgccgcccactacagcctgcccgagggccgccacggccgcctggacagccccaccttccacctcaccctgcactatcccacggagcacgtgcagttctgggtgggcagcccgtccaccccagcaggctgggtacgcgagggtgacactgtccagctgctctgccggggggacggcagccccagcccggagtatacgcttttccgccttcaggatgagcaggaggaagtgctgaatgtgaatctcgaggggaacttgaccctggagggagtgacccggggccagagcgggacctatggctgcagagtggaggattacgacgcggcagatgacgtgcagctctccaagacgctggagctgcgcgtggcctatctggaccccctggagctcagcgaggggaaggtgctttccttacctctaaacagcagtgcagtcgtgaactgctccgtgcacggcctgcccacccctgccctacgctggaccaaggactccactcccctgggcgatggccccatgctgtcgctcagttctatcaccttcgattccaatggcacctacgtatgtgaggcctccctgcccacagtcccggtcctcagccgcacccagaacttcacgctgctggtccaaggctcgccagagctaaagacagcggaaatagagcccaaggcagatggcagctggagggaaggagacgaagtcacactcatctgctctgcccgcggccatccagaccccaaactcagctggagccaattggggggcagccccgcagagccaatccccggacggcagggttgggtgagcagctctctgaccctgaaagtgaccagcgccctgagccgcgatggcatctcctgtgaagcctccaacccccacgggaacaagcgccatgtcttccacttcggcaccgtgagcccccagacctcccaggctggagtggccgtcatggccgtggccgtcagcgtgggcctcctgctcctcgtcgttgctgtcttctactgcgtgagacgcaaagggggcccctgctgccgccagcggcgggagaagggggctccgccgccaggggagccagggctgagccactcggggtcggagcaaccagagcagaccggccttctcatgggaggtgcctccggaggagccaggggtggcagcgggggcttcggagacgagtgctgagccaagaacctcctagaggctgtccctggacctggagctgcaggcatcagagaaccagccctgctcacgccatgcccgcccccgccttccctcttccctcttccctctccctgcccagccctcccttccttcctctgccggcaaggcagggacccacagtggctgcctgcctccgggagggaaggagagggagggtgggtgggtgggagggggccttcctccagggaatgtgactctcccaggccccagaatagctcctggacccaagcccaaggcccagcctgggacaaggctccgagggtcggctggccggagctatttttacctcccgcctcccctgctggtccccccacctgacgtcttgctgcagagtctgacactggattcccccccctcaccccgcccctggtcccactcctgcccccgccctacctccgccccaccccatcatctgtggacactggagtctggaataaatgctgtttgtcacatcaacaccaaaaaaaaaaaaaaaaaa

SEQ ID NO: 228 - DNA, 1044 bp, Homo sapiens
  gene (1)..(1044): Accession No. NM_000491
gcccttcccgcctctggggaagggaacttccgcttcggaccgagggcagtaggctctcggctcctggtcccactgctgctcagcccagtggcctcacaggacaccagcttcccaggaggcgtctgacacagtatgatgatgaagatcccatggggcagcatcccagtactgatgttgctcctgctcctgggcctaatcgatatctcccaggcccagctcagctgcaccgggcccccagccatccctggcatcccgggtatccctgggacacctggccccgatggccaacctgggaccccagggataaaaggagagaaagggcttccagggctggctggagaccatggtgagttcggagagaagggagacccagggattcctgggaatccaggaaaagtcggccccaagggccccatgggccctaaaggtggcccaggggcccctggagccccaggccccaaaggtgaatcgggagactacaaggccacccagaaaatcgccttctctgccacaagaaccatcaacgtccccctgcgccgggaccagaccatccgcttcgaccacgtgatcaccaacatgaacaacaattatgagccccgcagtggcaagttcacctgcaaggtgcccggtctctactacttcacctaccacgccagctctcgagggaacctgtgcgtgaacctcatgcgtggccgggagcgtgcacagaaggtggtcaccttctgtgactatgcctacaacaccttccaggtcaccaccggtggcatggtcctcaagctggagcagggggagaacgtcttcctgcaggccaccgacaagaactcactactgggcatggagggtgccaacagcatcttttccgggttcctgctctttccagatatggaggcctgacctgtgggctgcttcacatccaccccggctccccctgccagcaacgctcactctacccccaacaccaccccttgcccaaccaatgcacacagtagggcttggtgaatgctgctgagtgaatgagtaaataaactcttcaaggccaaggga

SEQ ID NO: 229 - DNA, 2034 bp, Homo sapiens
  gene (1)..(2034): Accession No. NM_001229
ggccctggggcgggggcgggtcctggggactggggcgggcggccgaggcccggaagcggactgaggcggcctggagtcttagttggctactcgccatggacgaagcggatcggcggctcctgcggcggtgccggctgcggctggtggaagagctgcaggtggaccagctctgggacgccctgctgagccgcgagctgttcaggccccatatgatcgaggacatccagcgggcaggctctggatctcggcgggatcaggccaggcagctgatcatagatctggagactcgagggagtcaggctcttcctttgttcatctcctgcttagaggacacaggccaggacatgctggcttcgtttctgcgaactaacaggcaagcagcaaagttgtcgaagccaaccctagaaaaccttaccccagtggtgctcagaccagagattcgcaaaccagaggttctcagaccggaaacacccagaccagtggacattggttctggaggatttggtgatgtcggtgctcttgagagtttgaggggaaatgcagatttggcttacatcctgagcatggagccctgtggccactgcctcattatcaacaatgtgaacttctgccgtgagtccgggctccgcacccgcactggctccaacatcgactgtgagaagttgcggcgtcgcttctcctcgctgcatttcatggtggaggtgaagggcgacctgactgccaagaaaatggtgctggctttgctggagctggcgcagcaggaccacggtgctctggactgctgcgtggtggtcattctctctcacggctgtcaggccagccacctgcagttcccaggggctgtctacggcacagatggatgccctgtgtcggtcgagaagattgtgaacatcttcaatgggaccagctgccccagcctgggagggaagcccaagctctttttcatccaggcctgtggtggggagcagaaagaccatgggtttgaggtggcctccacttcccctgaagacgagtcccctggcagtaaccccgagccagatgccaccccgttccaggaaggtttgaggaccttcgaccagctggacgccatatctagtttgcccacacccagtgacatctttgtgtcctactctactttcccaggttttgtttcctggagggaccccaagagtggctcctggtacgttgagaccctggacgacatctttgagcagtgggctcactctgaagacctgcagtccctcctgcttagggtcgctaatgctgtttcggtgaaagggatttataaacagatgcctggttgctttaatttcctccggaaaaaacttttctttaaaacatcataaggccagggcccctcaccctgccttatcttgcaccccaaagctttcctgccccaggcctgaaagaggctgaggcctggactttcctgcaactcaaggactttgcagccggcacagggtctgctctttctctgccagtgacagacaggctcttagcagcttccagattgacgacaagtgctgaacagtggaggaagagggacagatgaatgccgtggattgcacgtggcctcttgagcagtggctggtccagggctagtgacttgtgtcccatgatccctgtgttgtctctagagcagggattaacctctgcactactgacatgtggggccaggtcaccctttgctgtgaggctgtcctgtacattgtgggatgttcagcactgtcccttgcctcaatgccagtaacgcgtcttcctgagtggtgccaaacaaaaaggttctcaggtgttgccaaatatgtcctggggtataaaactttcctcgcctgacaaccactggtctgtagggatttttggctacacacaaaccagtatcgctcatagatcagcaaaccggggcctactagagtctgaacagctgtaatctatgaattctaagtgaaattttaaaaattgttaatttttcctatattgcattaattttaaaaaaaaaaaaaaaaaaaaaaaaaaaaaaaaaaaaaaaaaaaaaaa

SEQ ID NO: 230 - DNA, 2704 bp, Homo sapiens
  gene (1)..(2704): Accession No. NM_001753
gggagaaacgttctcactcgctctctgctcgctgcgggcgctccccgccctctgctgccagaaccttggggatgtgcctagacccggcgcagcacacgtccgggccaaccgcgagcagaacaaacctttggcgggcggccaggaggctccctcccagccaccgcccccctccagcgcctttttttccccccatacaatacaagatcttccttcctcagttcccttaaagcacagcccagggaaacctcctcacagttttcatccagccacgggccagcatgtctgggggcaaatacgtagactcggagggacatctctacaccgttcccatccgggaacagggcaacatctacaagcccaacaacaaggccatggcagacgagctgagcgagaagcaagtgtacgacgcgcacaccaaggagatcgacctggtcaaccgcgaccctaaacacctcaacgatgacgtggtcaagattgactttgaagatgtgattgcagaaccagaagggacacacagttttgacggcatttggaaggccagcttcaccaccttcactgtgacgaaatactggttttaccgcttgctgtctgccctctttggcatcccgatggcactcatctggggcatttacttcgccattctctctttcctgcacatctgggcagttgtaccatgcattaagagcttcctgattgagattcagtgcatcagccgtgtctattccatctacgtccacaccgtctgtgacccactctttgaagctgttgggaaaatattcagcaatgtccgcatcaacttgcagaaagaaatataaatgacatttcaaggatagaagtatacctgattttttttccttttaattttcctggtgccaatttcaagttccaagttgctaatacagcaacaatttatgaattgaattatcttggttgaaaataaaaagatcactttctcagttttcataagtattatgtctcttctgagctatttcatctatttttggcagtctgaatttttaaaacccatttaaatttttttccttacctttttatttgcatgtggatcaaccatcgctttattggctgagatatgaacatattgttgaaaggtaatttgagagaaatatgaagaactgaggaggaaaaaaaaaaaaaagaaaagaaccaacaacctcaactgcctactccaaaatgttggtcattttatgttaagggaagaattccagggtatggccatggagtgtacaagtatgtgggcagattttcagcaaactcttttcccactgtttaaggagttagtggattactgccattcacttcataatccagtaggatccagtgatccttacaagttagaaaacataatcttctgccttctcatgatccaactaatgccttactcttcttgaaattttaacctatgatattttctgtgcctgaatatttgttatgtagataacaagacctcagtgccttcctgtttttcacattttccttttcaaatagggtctaactcagcaactcgctttaggtcagcagcctccctgaagaccaaaattagaatatccatgacctagttttccatgcgtgtttctgactctgagctacagagtctggtgaagctcacttctgggcttcatctggcaacatctttatccgtagtgggtatggttgacactagcccaatgaaatgaattaaagtggaccaatagggctgagctctctgtgggctggcagtcctggaagccagctttccctgcctctcatcaactgaatgaggtcagcatgtctattcagcttcgtttattttcaagaataatcacgctttcctgaatccaaactaatccatcaccggggtggtttagtggctcaacattgtgttcccatttcagctgatcagtgggcctccaaggaggggctgtaaaatggaggccattgtgtgagcctatcagagttgctgcaaacctgacccctgctcagtaaagcacttgcaaccgtctgttatgctgtgacacatggcccctccccctgccaggagctttggacctaatccaagcatccctttgcccagaaagaagatgggggaggaggcagtaataaaaagattgaagtattttgctggaataagttcaaattcttctgaactcaaactgaggaatttcacctgtaaacctgagtcgtacagaaagctgcctggtatatccaaaagctttttattcctcctgctcatattgtgattctgcctttggggacttttcttaaaccttcagttatgatttttttttcatacacttattggaactctgcttgatttttgcctcttccagtcttcctgacactttaattaccaacctgttacctactttgactttttgcatttaaaacagacactggcatggatatagttttacttttaaactgtgtacataactgaaaatgtgctatactgcatactttttaaatgtaaagatatttttatctttatatgaagaaaatcacttaggaaatggctttgtgattcaatctgtaaactgtgtattccaagacatgtctgttctacatagatgcttagtccctcatgcaaatcaattactggtccaaaagattgctgaaattttatatgcttactgatatattttacaattttttatcatgcatgtcctgtaaaggttacaagcctgcacaataaaaatgtttaacggtt

SEQ ID NO: 231 - DNA, 2188 bp, Homo sapiens
  gene (1)..(2188): Accession No. NM_001838
agacaggggtagtgcgaggccgggcacagccttcctgtgtggttttaccgcccagagagcgtcatggacctggggaaaccaatgaaaagcgtgctggtggtggctctccttgtcattttccaggtatgcctgtgtcaagatgaggtcacggacgattacatcggagacaacaccacagtggactacactttgttcgagtctttgtgctccaagaaggacgtgcggaactttaaagcctggttcctccctatcatgtactccatcatttgtttcgtgggcctactgggcaatgggctggtcgtgttgacctatatctatttcaagaggctcaagaccatgaccgatacctacctgctcaacctggcggtggcagacatcctcttcctcctgacccttcccttctgggcctacagcgcggccaagtcctgggtcttcggtgtccacttttgcaagctcatctttgccatctacaagatgagcttcttcagtggcatgctcctacttctttgcatcagcattgaccgctacgtggccatcgtccaggctgtctcagctcaccgccaccgtgcccgcgtccttctcatcagcaagctgtcctgtgtgggcatctggatactagccacagtgctctccatcccagagctcctgtacagtgacctccagaggagcagcagtgagcaagcgatgcgatgctctctcatcacagagcatgtggaggcctttatcaccatccaggtggcccagatggtgatcggctttctggtccccctgctggccatgagcttctgttaccttgtcatcatccgcaccctgctccaggcacgcaactttgagcgcaacaaggccatcaaggtgatcatcgctgtggtcgtggtcttcatagtcttccagctgccctacaatggggtggtcctggcccagacggtggccaacttcaacatcaccagtagcacctgtgagctcagtaagcaactcaacatcgcctacgacgtcacctacagcctggcctgcgtccgctgctgcgtcaaccctttcttgtacgccttcatcggcgtcaagttccgcaacgatctcttcaagctcttcaaggacctgggctgcctcagccaggagcagctccggcagtggtcttcctgtcggcacatccggcgctcctccatgagtgtggaggccgagaccaccaccaccttctccccataggcgactcttctgcctggactagagggacctctcccagggtccctggggtggggatagggagcagatgcaatgactcaggacatccccccgccaaaagctgctcagggaaaagcagctctcccctcagagtgcaagcccctgctccagaagatagcttcaccccaatcccagctacctcaaccaatgccaaaaaaagacagggctgataagctaacaccagacagacaacactgggaaacagaggctattgtcccctaaaccaaaaactgaaagtgaaagtccagaaactgttcccacctgctggagtgaaggggccaaggagggtgagtgcaaggggcgtgggagtggcctgaagagtcctctgaatgaaccttctggcctcccacagactcaaatgctcagaccagctcttccgaaaaccaggccttatctccaagaccagagatagtggggagacttcttggcttggtgaggaaaagcggacatcagctggtcaaacaaactctctgaacccctccctccatcgttttcttcactgtcctccaagccagcgggaatggcagctgccacgccgccctaaaagcacactcatcccctcacttgccgcgtcgccctcccaggctctcaacaggggagagtgtggtgtttcctgcaggccaggccagctgcctccgcgtgatcaaagccacactctgggctccagagtggggatgacatgcactcagctcttggctccactgggatgggaggagaggacaagggaaatgtcaggggcggggagggtgacagtggccgcccaaggcccacgagcttgttctttgttctttgtcacagggactgaaaacctctcctcatgttctgctttcgattcgttaagagagcaacattttacccacacacagataaagttttcccttgaggaaacaacagctttaaaagaaaaagaaaaaaaaagtctttggtaaatggcaaaaaaaaaaaaaaaaaa

SEQ ID NO: 232 - DNA, 1834 bp, Homo sapiens; identical to SEQ ID NO: 133
  gene (1)..(1834): Accession No. NM_000074

SEQ ID NO: 233 - DNA, 7635 bp, Homo sapiens
  gene (1)..(7635): Accession No. NM_000611
ggggccggggggcggagccttgcgggctggagcgaaagaatgcgggggctgagcgcagaagcggctcgaggctggaagaggatcttgggcgccgccaggttctgtggacaatcacaatgggaatccaaggagggtctgtcctgttcgggctgctgctcgtcctggctgtcttctgccattcaggtcatagcctgcagtgctacaactgtcctaacccaactgctgactgcaaaacagccgtcaattgttcatctgattttgatgcgtgtctcattaccaaagctgggttacaagtgtataacaagtgttggaagtttgagcattgcaatttcaacgacgtcacaacccgcttgagggaaaatgagctaacgtactactgctgcaagaaggacctgtgtaactttaacgaacagcttgaaaatggtgggacatccttatcagagaaaacagttcttctgctggtgactccatttctggcagcagcctggagccttcatccctaagtcaacaccaggagagcttctcccaaactccccgttcctgcgtagtccgctttctcttgctgccacattctaaaggcttgatattttccaaatggatcctgttgggaaagaataaaattagcttgagcaacctggctaagatagaggggctctgggagactttgaagaccagtcctgtttgcagggaagccccacttgaaggaagaagtctaagagtgaagtaggtgtgacttgaactagattgcatgcttcctcctttgctcttgggaagaccagctttgcagtgacagcttgagtgggttctctgcagccctcagattatttttcctctggctccttggatgtagtcagttagcatcattagtacatctttggagggtggggcaggagtatatgagcatcctctctcacatggaacgctttcataaacttcagggatcccgtgttgccatggaggcatgccaaatgttccatatgtgggtgtcagtcagggacaacaagatccttaatgcagagctagaggacttctggcagggaagtggggaagtgttccagatagcagggcatgaaaacttagagaggtacaagtggctgaaaatcgagtttttcctctgtctttaaattttatatgggctttgttatcttccactggaaaagtgtaatagcatacatcaatggtgtgttaaagctatttccttgccttttttttattggaatggtaggatatcttggctttgccacacacagttacagagtgaacactctactacatgtgactggcagtattaagtgtgcttattttaaatgttactggtagaaaggcagttcaggtatgtgtgtatatagtatgaatgcagtggggacaccctttgtggttacagtttgagacttccaaaggtcatccttaataacaacagatctgcaggggtatgttttaccatctgcatccagcctcctgctaactcctagctgactcagcatagattgtataaaatacctttgtaacggctcttagcacactcacagatgtttgaggctttcagaagctcttctaaaaaatgatacacacctttcacaagggcaaactttttccttttccctgtgtattctagtgaatgaatctcaagattcagtagacctaatgacatttgtattttatgatcttggctgtatttaatggcataggctgacttttgcagatggaggaatttcttgattaatgttgaaaaaaaacccttgattatactctgttggacaaaccgagtgcaatgaatgatgcttttctgaaaatgaaatataacaagtgggtgaatgtggttatggccgaaaaggatatgcagtatgcttaatggtagcaactgaaagaagacatcctgagcagtgccagctttcttctgttgatgccgttccctgaacataggaaaatagaaacttgcttatcaaaacttagcattaccttggtgctctgtgttctctgttagctcagtgtctttccttacatcaataggtttttttttttttttttggcctgaggaagtactgaccatgcccacagccaccggctgagcaaagaagctcatttcatgtgagttctaaggaatgagaaacaattttgatgaatttaagcagaaaatgaatttctgggaacttttttgggggcgggggggtggggaattcagccacactccagaaagccaggagtcgacagttttggaagcctctctcaggattgagattctaggatgagattggcttactgctatcttgtgtcatgtacccactttttggccagactacactgggaagaaggtagtcctctaaagcaaaatctgagtgccactaaatggggagatggggctgttaagctgtccaaatcaacaagggtcatataaatggccttaaactttggggttgctttctgcaaaaagttgctgtgactcatgccatagacaaggttgagtgcctggacccaaaggcaatactgtaatgtaaagacatttatagtactaggcaaacagcaccccaggtactccaggccctcctggctggagagggctgtggcaatagaaaattagtgccaactgcagtgagtcagcctaggttaaatagagagtgtaagagtgctggacaggaacctccaccctcatgtcacatttcttcaatgtgacccttctggcccctctcctcctgacagcggaacaatgactgccccgataggtgaggctggaggaagaatcagtcctgtccttggcaagctcttcactatgacagtaaaggctctctgcctgctgccaaggcctgtgactttctaacctggcctcacgctgggtaagcttaaggtagaggtgcaggattagcaagcccacctggctaccaggccgacagctacatcctccaactgaccctgatcaacgaagagggattcatgtgtctgtctcagttggttccaaatgaaaccagggagcaggggagttaggaatcgaacaccagtcatgcctactggctctctgctcgagagccaataccctgtgccctccactcatctggatttacaggaactgtcatagtgttcagtattgggtggtgataagcccattggattgtccccttggggggatgagctaggggtgcaaggaacacctgatgagtagataagtggagctcatggtatttcctgaaagatgctaatctatttgccaaacttggtcttgaatgtactgggggcttcaaggtatgggtatatttttcttgtgtccttgcagttagcccccatgtcttatgtgtgtcctgaaaaaataagagcctgcccaagactttgggcctcttgacagaattaaccacttttatacatctgagttctcttggtaagttctttagcagtgttcaaagtctactagctcgcattagtttctgttgctgccaacagatctgaactaatgctaacagatccccctgagggattcttgatgggctgagcagctggctggagctagtactgactgacattcattgtgatgagggcagctttctggtacaggattctaagctctatgttttatatacattttcatctgtacttgcacctcactttacacaagaggaaactatgcaaagttagctggatcgctcaaggtcacttaggtaagttggcaagtccatgcttcccactcagctcctcaggtcagcaagtctacttctctgcctattttgtatactctctttaatatgtgcctagctttggaaagtctagaatgggtccctggtgcctttttactttgaagaaatcagtttctgcctctttttggaaaagaaaacaaagtgcaattgttttttactggaaagttacccaatagcatgaggtgaacaggacgtagttaggccttcctgtaaacagaaaatcatatcaaaacactatcttcccatctgtttctcaatgcctgctacttcttgtagatatttcatttcaggagagcagcagttaaacccgtggattttgtagttaggaacctgggttcaaaccctcttccactaattggctatgtctctggacaagtttttttttttttttttttttaaaccctttctgaactttcactttctatgtctacctcaaagaattgttgtgaggcttgagataatgcatttgtaaagggtctgccagataggaagatgctagttatggatttacaaggttgttaaggctgtaagagtctaaaacctacagtgaatcacaatgcatttacccccactgacttggacataagtgaaaactagccagaagtctctttttcaaattacttacaggttattcaatataaaatttttgtaatggataatcttatttatctaaactaaagcttcctgtttatacacactcctgttattctgggataagataaatgaccacagtaccttaatttctaggtgggtgcctgtgatggttcattgtaggtaaggacattttctctttttcagcagctgtgtaggtccagagcctctgggagaggaggggggtagcatgcacccagcaggggactgaactgggaaactcaaggttctttttactgtggggtagtgagctgcctttctgtgatcggtttccctagggatgttgctgttcccctccttgctattcgcagctacatacaacgtggccaaccccagtaggctgatcctatatatgatcagtgctggtgctgactctcaatagccccacccaagctggctataggtttacagatacattaattaggcaacctaaaatattgatgctggtgttggtgtgacataatgctatggccagaactgaaacttagagttataattcatgtattagggttctccagagggacagaattagtaggatatatgtatatatgaaagggaggttattagggagaactggctcccacagttagaaggcgaagtcgcacaataggccgtctgcaagctgggttagagagaagccagtagtggctcagcctgagttcaaaaacctcaaaactggggaagctgacagtgcagccagccttcagtctgtggccaaaggcccaagagcccctggcaaccaacccactggtgcaagtcctagattccaaaggctgaagaacctggagtctgatgtccaagagcaggaagagtggaagaaagccagaagactcagcaaacaaggtagacagtgtctaccaccatagtggccataccaaagaggctaccgattccttcctgctacctggatccctgaagttgccctggtctctgcaccttctaaacctagttcttaagagctttccattacatgagctgtctcaaagccctccaataaattctcagtgtaagcttctgttgcttgtggacagaaaattctgacagacctaccctataagtgttactgtcaggataacatgagaacgcacaacagtaagtggtcactaagtgttagctacggttattttgcccaaggtagcatggctagttgatgccggttgatggggcttaaacccagctccctcatcttccaggcctctgtactccctattccactaaactacctctcaggtttatttttttaaattcttactctgcaagtacataggaccacatttacctgggaaaacaagaataaaggctgctctgcattttttagaaacttttttgaaagggagatgggaatgcctgcacccccaagtccagaccaacacaatggttaattgagatgaataataaaggaaagactgttctgggcttcccagaatagcttggtccttaaattgtggcacaaacaacctcctgtcagagccagcctcctgccaggaagaggggtaggagactagaggccgtgtgtgcagccttgccctgaaggctagggtgacaatttggaggctgtccaaacaccctggcctctagagctggcctgtctatttgaaatgccggctctgatgctaatcggcgaccctcaggcaagttacttaaccttacatgcctcagttttctcatctggaaaatgagaaccctaggtttagggttgttagaaaagttaaatgagttaagacaagtgcctgggacacagtagcctcttgtgtgtgtttatcattatgtcctcagcaggtcgtagaagcagcttctcaggtgtgaggctggcgcgattatctggagtgggttgggttttctaggatggaccccctgctgcattttcctcattcatccaccagggcttaatggggaatcaaggaatccatgtgtaactgtataataactgtagccacactccaatgaccacctactagttgtccctggcactgcttatacatatgtccatcaaatcaatcctatgaagtagatactgtcttcattttatagatcagagacaattggggttcagagagctgatgtgattttcccagggtcacagagagtcccagattcaggcacaactcttgtattccaagacacaaccactacatgtccaaaggctgcccagagccaccgggcacggcaaattgtgacatatccctaaagaggctgagcacctggtcaggatctgatggctgacagtgtgtccagatgcagagctggagtgggggaggggaaggggggctccttgggacagagaaggctttctgtgctttctctgaagggagcagtctgaggaccaagggaacccggcaaacagcacctcaggtactccaggccctcctggctggagagggctgtggcaatggaaaattagtgccaactgcaatgagtcagcctcggttaaatagagagtgaagaatgctggacaggaacctccaccctcatgtcacatttcttcagtgtgacccttctggcccctctcctcctgacagcggaacaatgactgccccgataggtgaggctggaggaagaatcagtcctgtccttggcaagctcttcactatgacagtaaaggctctctgcctgctgccaaggcctgtgactttctaacctggcctcacgctgggtaagcttaaggtagaggtgcaggattagcaagcccacctggctaccaggccgacagctacatctttcaactgaccctgatcaacgaagagggacttgtgtctctcagttggttccaaatgaaaccagggagcaggggcgttaggaagctccaacaggatggtacttaatggggcatttgagtggagaggtaggtgacatagtgctttggagcccagggagggaaaggttctgctgaagttgaattcaagactgttctttcatcacaaacttgagtttcctggacatttgtttgcagaaacaaccgtagggttttgccttaacctcgtgggtttattattacctcatagggactttgcctcctgacagcagtttatgggtgttcattgtggcacttgagttttcttgcatacttgttagagaaaccaagtttgtcatcaacttcttatttaaccccctggctataacttcatggattatgttataattaagccatccagagtaaaatctgtttagattatcttggagtaagggggaaaaaatctgtaattttttctcctcaactagatatatacataaaaaatgattgtattgcttcatttaaaaaatataacgcaaaatctcttttccttctaaaaaaaaaaaaaaaaaa

SEQ ID NO: 234 - DNA, 3247 bp, Homo sapiens
  gene (1)..(3247): Accession No. NM_078481
cgccccccctccttcataaagtcctggcctcgggacagcctgcacagctgcctagcctgtggagacgggacagccctgtcccactcactctttcccctgccgctcctgccggcagctccaaccatgggaggccgcgtctttctcgcattctgtgtctggctgactctgccgggagctgaaacccaggactccaggggctgtgcccggtggtgccctcagaactcctcgtgtgtcaatgccaccgcctgtcgctgcaatccagggttcagctctttttctgagatcatcaccaccccgacggagacttgtgacgacatcaacgagtgtgcaacaccgtcgaaagtgtcatgcggaaaattctcggactgctggaacacagaggggagctacgactgcgtgtgcagcccgggatatgagcctgtttctggggcaaaaacattcaagaatgagagcgagaacacctgtcaagatgtggacgaatgtcagcagaacccaaggctctgtaaaagctacggcacctgcgtcaacacccttggcagctatacctgccagtgcctgcctggcttcaagttcatacctgaggatccgaaggtctgcacagatgtgaatgaatgcacctccggacaaaacccgtgccacagctccacccactgcctcaacaacgtgggcagctatcagtgccgctgccgcccgggctggcaaccgattccggggtcccccaatggcccaaacaataccgtctgtgaagatgtggacgagtgcagctccgggcagcatcagtgtgacagctccaccgtctgcttcaacaccgtgggttcatacagctgccgctgccgcccaggctggaagcccagacacggaatcccgaataaccaaaaggacactgtctgtgaagatatgactttctccacctggaccccgccccctggagtccacagccagacgctttcccgattcttcgacaaagtccaggacctgggcagagactccaagacaagctcagccgaggtcaccatccagaatgtcatcaaattggtggatgaactgatggaagctcctggagacgtagaggccctggcgccacctgtccggcacctcatagccacccagctgctctcaaaccttgaagatatcatgaggatcctggccaagagcctgcctaaaggccccttcacctacatttccccttcgaacacagagctgaccctgatgatccaggagcggggggacaagaacgtcactatgggtcagagcagcgcacgcatgaagctgaattgggctgtggcagctggagccgaggatccaggccccgccgtggcgggcatcctctccatccagaacatgacgacattgctggccaatgcctccttgaacctgcattccaagaagcaagccgaactggaggagatatatgaaagcagcatccgtggtgtccaactcagacgcctctctgccgtcaactccatctttctgagccacaacaacaccaaggaactcaactcccccatccttttcgccttctcccaccttgagtcctccgatggggaggcgggaagagaccctcctgccaaggacgtgatgcctgggccacggcaggagctgctctgtgccttctggaagagtgacagcgacaggggagggcactgggccaccgagggctgccaggtgctgggcagcaagaacggcagcaccacctgccaatgcagccacctgagcagctttgcgatccttatggctcattatgacgtggaggactggaagctgaccctgatcaccagggtgggactggcgctgtcactcttctgcctgctgctgtgcatcctcactttcctgctggtgcggcccatccagggctcgcgcaccaccatacacctgcacctctgcatctgcctcttcgtgggctccaccatcttcctggccggcatcgagaacgaaggcggccaggtggggctgcgctgccgcctggtggccgggctgctgcactactgtttcctggccgccttctgctggatgagcctcgaaggcctggagctctactttcttgtggtgcgcgtgttccaaggccagggcctgagtacgcgctggctctgcctgatcggctatggcgtgcccctgctcatcgtgggcgtctcggctgccatctacagcaagggctacggccgccccagatactgctggttggactttgagcagggcttcctctggagcttcttgggacctgtgaccttcatcattttgtgcaatgctgtcattttcgtgactaccgtctggaagctcactcagaagttttctgaaatcaatccagacatgaagaaattaaagaaggcgagggcgctgaccatcacggccatcgcgcagctcttcctgttgggctgcacctgggtctttggcctgttcatcttcgacgatcggagcttggtgctgacctatgtgtttaccatcctcaactgcctgcagggcgccttcctctacctgctgcactgcctgctcaacaagaaggttcgggaagaataccggaagtgggcctgcctagttgctggggggagcaagtactcagaattcacctccaccacgtctggcactggccacaatcagacccgggccctcagggcatcagagtccggcatatgaaggcgcatggttctggacggcccagcagctcctgtggccacagcagctttgtacacgaagaccatccatcctcccttcgtccaccactctactccctccaccctccctccctgatcccgtgtgccaccaggagggagtggcagctatagtctggcaccaaagtccaggacacccagtggggtggagtcggagccactggtcctgctgctggctgcctctctgctccaccttgtgacccagggtggggacaggggctggcccagggctgcaatgcagcatgttgccctggcacctgtggccagtactcgggacagactaagggcgcttgtcccatcctggacttttcctctcatgtctttgctgcagaactgaagagactaggcgctggggctcagcttccctcttaagctaagactgatgtcagaggccccatggcgaggccccttggggccactgcctgaggctcacggtacagaggcctgccctgcctggccgggcaggaggttctcactgttgtgaaggttgtagacgttgtgtaatgtgtttttatctgttaaaatttttcagtgttgacacttaaaattaaacacatgcatacagaaaaaaaaaaaaaaaa

SEQ ID NO: 235 - DNA, 4815 bp, Homo sapiens
  gene (1)..(4815): Accession No. NM_004360
agtggcgtcggaactgcaaagcacctgtgagcttgcggaagtcagttcagactccagcccgctccagcccggcccgacccgaccgcacccggcgcctgccctcgctcggcgtccccggccagccatgggcccttggagccgcagcctctcggcgctgctgctgctgctgcaggtctcctcttggctctgccaggagccggagccctgccaccctggctttgacgccgagagctacacgttcacggtgccccggcgccacctggagagaggccgcgtcctgggcagagtgaattttgaagattgcaccggtcgacaaaggacagcctatttttccctcgacacccgattcaaagtgggcacagatggtgtgattacagtcaaaaggcctctacggtttcataacccacagatccatttcttggtctacgcctgggactccacctacagaaagttttccaccaaagtcacgctgaatacagtggggcaccaccaccgccccccgccccatcaggcctccgtttctggaatccaagcagaattgctcacatttcccaactcctctcctggcctcagaagacagaagagagactgggttattcctcccatcagctgcccagaaaatgaaaaaggcccatttcctaaaaacctggttcagatcaaatccaacaaagacaaagaaggcaaggttttctacagcatcactggccaaggagctgacacaccccctgttggtgtctttattattgaaagagaaacaggatggctgaaggtgacagagcctctggatagagaacgcattgccacatacactctcttctctcacgctgtgtcatccaacgggaatgcagttgaggatccaatggagattttgatcacggtaaccgatcagaatgacaacaagcccgaattcacccaggaggtctttaaggggtctgtcatggaaggtgctcttccaggaacctctgtgatggaggtcacagccacagacgcggacgatgatgtgaacacctacaatgccgccatcgcttacaccatcctcagccaagatcctgagctccctgacaaaaatatgttcaccattaacaggaacacaggagtcatcagtgtggtcaccactgggctggaccgagagagtttccctacgtataccctggtggttcaagctgctgaccttcaaggtgaggggttaagcacaacagcaacagctgtgatcacagtcactgacaccaacgataatcctccgatcttcaatcccaccacgtacaagggtcaggtgcctgagaacgaggctaacgtcgtaatcaccacactgaaagtgactgatgctgatgcccccaataccccagcgtgggaggctgtatacaccatattgaatgatgatggtggacaatttgtcgtcaccacaaatccagtgaacaacgatggcattttgaaaacagcaaagggcttggattttgaggccaagcagcagtacattctacacgtagcagtgacgaatgtggtaccttttgaggtctctctcaccacctccacagccaccgtcaccgtggatgtgctggatgtgaatgaagcccccatctttgtgcctcctgaaaagagagtggaagtgtccgaggactttggcgtgggccaggaaatcacatcctacactgcccaggagccagacacatttatggaacagaaaataacatatcggatttggagagacactgccaactggctggagattaatccggacactggtgccatttccactcgggctgagctggacagggaggattttgagcacgtgaagaacagcacgtacacagccctaatcatagctacagacaatggttctccagttgctactggaacagggacacttctgctgatcctgtctgatgtgaatgacaacgcccccataccagaacctcgaactatattcttctgtgagaggaatccaaagcctcaggtcataaacatcattgatgcagaccttcctcccaatacatctcccttcacagcagaactaacacacggggcgagtgccaactggaccattcagtacaacgacccaacccaagaatctatcattttgaagccaaagatggccttagaggtgggtgactacaaaatcaatctcaagctcatggataaccagaataaagaccaagtgaccaccttagaggtcagcgtgtgtgactgtgaaggggccgctggcgtctgtaggaaggcacagcctgtcgaagcaggattgcaaattcctgccattctggggattcttggaggaattcttgctttgctaattctgattctgctgctcttgctgtttcttcggaggagagcggtggtcaaagagcccttactgcccccagaggatgacacccgggacaacgtttattactatgatgaagaaggaggcggagaagaggaccaggactttgacttgagccagctgcacaggggcctggacgctcggcctgaagtgactcgtaacgacgttgcaccaaccctcatgagtgtcccccggtatcttccccgccctgccaatcccgatgaaattggaaattttattgatgaaaatctgaaagcggctgatactgaccccacagccccgccttatgattctctgctcgtgtttgactatgaaggaagcggttccgaagctgctagtctgagctccctgaactcctcagagtcagacaaagaccaggactatgactacttgaacgaatggggcaatcgcttcaagaagctggctgacatgtacggaggcggcgaggacgactaggggactcgagagaggcgggccccagacccatgtgctgggaaatgcagaaatcacgttgctggtggtttttcagctcccttcccttgagatgagtttctggggaaaaaaaagagactggttagtgatgcagttagtatagctttatactctctccactttatagctctaataagtttgtgttagaaaagtttcgacttatttcttaaagcttttttttttttcccatcactctttacatggtggtgatgtccaaaagatacccaaattttaatattccagaagaacaactttagcatcagaaggttcacccagcaccttgcagattttcttaaggaattttgtctcacttttaaaaagaaggggagaagtcagctactctagttctgttgttttgtgtatataattttttaaaaaaaatttgtgtgcttctgctcattactacactggtgtgtccctctgccttttttttttttttaagacagggtctcattctatcggccaggctggagtgcagtggtgcaatcacagctcactgcagccttgtcctcccaggctcaagctatccttgcacctcagcctcccaagtagctgggaccacaggcatgcaccactacgcatgactaattttttaaatatttgagacggggtctccctgtgttacccaggctggtctcaaactcctgggctcaagtgatcctcccatcttggcctcccagagtattgggattacagacatgagccactgcacctgcccagctccccaactccctgccattttttaagagacagtttcgctccatcgcccaggcctgggatgcagtgatgtgatcatagctcactgtaacctcaaactctggggctcaagcagttctcccaccagcctcctttttatttttttgtacagatggggtcttgctatgttgcccaagctggtcttaaactcctggcctcaagcaatccttctgccttggccccccaaagtgctgggattgtgggcatgagctgctgtgcccagcctccatgttttaatatcaactctcactcctgaattcagttgctttgcccaagataggagttctctgatgcagaaattattgggctcttttagggtaagaagtttgtgtctttgtctggccacatcttgactaggtattgtctactctgaagacctttaatggcttccctctttcatctcctgagtatgtaacttgcaatgggcagctatccagtgacttgttctgagtaagtgtgttcattaatgtttatttagctctgaagcaagagtgatatactccaggacttagaatagtgcctaaagtgctgcagccaaagacagagcggaactatgaaaagtgggcttggagatggcaggagagcttgtcattgagcctggcaatttagcaaactgatgctgaggatgattgaggtgggtctacctcatctctgaaaattctggaaggaatggaggagtctcaacatgtgtttctgacacaagatccgtggtttgtactcaaagcccagaatccccaagtgcctgcttttgatgatgtctacagaaaatgctggctgagctgaacacatttgcccaattccaggtgtgcacagaaaaccgagaatattcaaaattccaaatttttttcttaggagcaagaagaaaatgtggccctaaagggggttagttgaggggtagggggtagtgaggatcttgatttggatctctttttatttaaatgtgaatttcaacttttgacaatcaaagaaaagacttttgttgaaatagctttactgtttctcaagtgttttggagaaaaaaatcaaccctgcaatcactttttggaattgtcttgatttttcggcagttcaagctatatcgaatatagttctgtgtagagaatgtcactgtagttttgagtgtatacatgtgtgggtgctgataattgtgtattttctttgggggtggaaaaggaaaacaattcaagctgagaaaagtattctcaaagatgcatttttataaattttattaaacaattttgttaaaccat

SEQ ID NO: 236 - DNA, 3497 bp, Homo sapiens
  gene (1)..(3497): Accession No. NM_001712
aggctcagcacagagagtggaaaacagcagaggtgacagagcagccgtgctcgaagcgttcctggagcccaagctctcctccacaggtgaagacagggccagcaggagacaccatggggcacctctcagccccacttcacagagtgcgtgtaccctggcaggggcttctgctcacagcctcacttctaaccttctggaacccgcccaccactgcccagctcactactgaatccatgccattcaatgttgcagaggggaaggaggttcttctccttgtccacaatctgccccagcaactttttggctacagctggtacaaaggggaaagagtggatggcaaccgtcaaattgtaggatatgcaataggaactcaacaagctaccccagggcccgcaaacagcggtcgagagacaatataccccaatgcatccctgctgatccagaacgtcacccagaatgacacaggattctacaccctacaagtcataaagtcagatcttgtgaatgaagaagcaactggacagttccatgtatacccggagctgcccaagccctccatctccagcaacaactccaaccctgtggaggacaaggatgctgtggccttcacctgtgaacctgagactcaggacacaacctacctgtggtggataaacaatcagagcctcccggtcagtcccaggctgcagctgtccaatggcaacaggaccctcactctactcagtgtcacaaggaatgacacaggaccctatgagtgtgaaatacagaacccagtgagtgcgaaccgcagtgacccagtcaccttgaatgtcacctatggcccggacacccccaccatttccccttcagacacctattaccgtccaggggcaaacctcagcctctcctgctatgcagcctctaacccacctgcacagtactcctggcttatcaatggaacattccagcaaagcacacaagagctctttatccctaacatcactgtgaataatagtggatcctatacctgccacgccaataactcagtcactggctgcaacaggaccacagtcaagacgatcatagtcactgagctaagtccagtagtagcaaagccccaaatcaaagccagcaagaccacagtcacaggagataaggactctgtgaacctgacctgctccacaaatgacactggaatctccatccgttggttcttcaaaaaccagagtctcccgtcctcggagaggatgaagctgtcccagggcaacaccaccctcagcataaaccctgtcaagagggaggatgctgggacgtattggtgtgaggtcttcaacccaatcagtaagaaccaaagcgaccccatcatgctgaacgtaaactataatgctctaccacaagaaaatggcctctcacctggggccattgctggcattgtgattggagtagtggccctggttgctctgatagcagtagccctggcatgttttctgcatttcgggaagaccggcagggcaagcgaccagcgtgatctcacagagcacaaaccctcagtctccaaccacactcaggaccactccaatgacccacctaacaagatgaatgaagttacttattctaccctgaactttgaagcccagcaacccacacaaccaacttcagcctccccatccctaacagccacagaaataatttattcagaagtaaaaaagcagtaatgaaacctgtcctgctcactgcagtgctgatgtatttcaagtctctcaccctcatcactaggagattcctttcccctgtaggggtagaggggtggggacagaaacaactttctcctactcttccttcctaataggcatctccaggctgcctggtcactgcccctctctcagtgtcaatagatgaaagtacattgggagtctgtaggaaacccaaccttcttgtcattgaaatttggcaaagctgactttgggaaagagggaccagaacttcccctcccttccccttttcccaacctggacttgttttaaacttgcctgttcagagcactcattccttcccacccccagtcctgtcctatcactctaattcggatttgccatagccttgaggttatgtccttttccattaagtacatgtgccaggaaacaagagagagagaaagtaaaggcagtaatgccttctcctatttctccaaagccttgtgtgaactcaccaaacacaagaaaatcaaatatataaccaatagtgaaatgccacacctttgtccactgtcagggttgtctacctgtaggatcagggtctaagcaccttggtgcttagctagaataccacctaatccttctggcaagcctgtcttcagagaacccactagaagcaactaggaaaatcacttgccaaaatccaaggcaattcctgatggaaaatgcaaaagcacatatatgttttaatatctttatgggctctgttcaaggcagtgctgagagggaggggttatagcttcaggagggaaccagcttctgataaacacaatctgctaggaacttgggaaaggaatcagagagctgcccttcagcgattatttaaattattgttaaagaatacacaatttggggtattgggatttttctccttttctctgagacattccaccattttaatttttgtaactgcttatttatgtgaaaagggttatttttacttagcttagctatgtcagccaatccgattgccttaggtgaaagaaaccaccgaaatccctcaggtcccttggtcaggagcctctcaagattttttttgtcagaggctccaaatagaaaataagaaaaggttttcttcattcatggctagagctagatttaactcagtttctaggcacctcagaccaatcatcaactaccattctattccatgtttgcacctgtgcattttctgtttgcccccattcactttgtcaggaaaccttggcctctgctaaggtgtatttggtccttgagaagtgggagcaccctacagggacactatcactcatgctggtggcattgtttacagctagaaagctgcactggtgctaatgccccttggggaaatggggctgtgaggaggaggattataacttaggcctagcctcttttaacagcctctgaaatttatcttttcttctatggggtctataaatgtatcttataataaaaaggaaggacaggaggaagacaggcaaatgtacttctcacccagtcttctacacagatggaatctctttggggctaagagaaaggttttattctatattgcttacctgatctcatgttaggcctaagaggctttctccaggaggattagcttggagttctctatactcaggtacctctttcagggttttctaaccctgacacggactgtgcatactttccctcatccatgctgtgctgtgttatttaatttttcctggctaagatcatgtctgaattatgtatgaaaattattctatgtttttataataaaaataatatatcagacatcga

SEQ ID NO: 237 - DNA, 5769 bp, Homo sapiens
  gene (1)..(5769): Accession No. NM_014927
gtcatttccgccgggcagctagtcgtgctcggggcttcactcccgcgcgtgaggcgagcgggcaagttggctgagggcgtgcggcagaggctgcttccctcggcgacgcgacccctcagcaactcaagctatgaactgaagctccctagggacggagaccggagcggagcggcggaggcagcagcagcagcagcagcagcagcagcagcagcagccgccgccgccgccgccttagcgggaactgagcagacccggcgcggagccacgactcctgcacgtttacctccctgtcgccgttcctgccggcggttggctaaaagacgttacagccgcgagacccgacacacaaaagccgctttctccgcgccgcccgcccagggaggctgcggccagcaagggaccccacctgagagcagctcgggctgctgagttcgttttgtgtctgagctctgcgctctgcacggaaccgaccccgtacccatggctctgataatggaaccggtgagcaaatggtctccgagtcaagtagtggactggatgaaaggtcttgatgactgtttgcagcagtatattaagaactttgagagggagaagatcagtggggaccagctgctgcgcattacacatcaggagctagaagatctgggggtcagccgcattggccatcaggaactgatcttggaagcagttgaccttctgtgtgcattgaattatggcttggaaacagaaaatctaaaaaccctttctcacaagttgaatgcatctgccaaaaatctgcagaattttataacaggaaggagaaggagtggccattatgatgggaggaccagccgaaaattgccaaacgactttctgacctcagttgtggatctgattggagcagccaagagtctgcttgcctggttggacaggtcaccatttgctgctgtgacagactattcagttacaagaaataatgtcatacaactctgcctggagttaacaacaattgtgcaacaggattgtactgtatatgaaacagagaataaaattcttcacgtgtgtaaaactctttctggagtctgtgaccacatcatatccctgtcgtcagatcctctggtttcacagtctgctcacctggaagtgattcaactggcaaacattaaaccaagcgaagggctgggtatgtatattaaatctacatatgatggcctccatgtaattactggaaccacagaaaattcacctgcagatcggtgcaagaaaatccatgctggcgatgaagtgattcaagttaatcatcagactgtggtggggtggcagttgaaaaatttggtgaatgcactacgagaggacccgagtggtgttatcttaactttgaaaaagcgacctcagagcatgcttacctcagcaccagctttactgaaaaatatgagatggaagccccttgctctgcagcctcttatacctagaagtcccacaagcagcgttgccacgccttccagcaccatcagtacacccaccaaaagagacagttctgccctccaggatctctacattccccctcctcctgcagaaccatatattcccagggatgaaaaaggaaaccttccttgtgaagacctcagaggacatatggtgggcaagccagtgcataagggatctgaatcaccaaattcatttctggatcaggaatatcgaaagagatttaatattgtcgaagaagatactgtcttatattgctatgaatatgaaaaaggaagatcaagtagtcaaggaagacgagaaagcaccccaacttatggcaagctacgacctatatctatgccagtggaatataattgggtgggggactatgaagatccaaataagatgaagagagatagtagaagagaaaactctctacttcggtatatgagcaatgaaaagattgctcaagaagaatacatgtttcagagaaacagcaaaaaggacacagggaagaagtcaaaaaagaagggtgataagagtaatagcccaactcactattcattgctacctagtttacaaatggatgcactgagacaagacatcatgggcactcctgtgccagagaccacactataccatacatttcagcagtcctcactgcagcacaaatcaaagaagaaaaacaaaggtcctatagcaggcaagagcaaaagacgaatttcttgcaaagatcttggccgtggtgactgtgagggctggctttggaaaaagaaagatgcgaagagttacttttcacagaaatggaaaaaatattggtttgtcctaaaggatgcatccctttattggtatattaatgaggaggatgaaaaagcagaaggattcattagcctgcctgaatttaaaattgatagagccagtgaatgccgcaaaaaatatgcattcaaagcctgtcatcctaaaatcaaaagcttttattttgctgctgaacatcttgatgatatgaacaggtggcttaacagaattaatatgctgactgcaggatatgcagaaagagagaggattaagcaggaacaagattactggagtgagagtgacaaggaagaagcagatactccatcaacaccaaaacaagatagccctccacccccatatgatacatacccacgacctccctcgatgagttgcgccagtccttatgtggaagcaaaacatagccgactttcctccacggagacttctcagtctcagtcttctcatgaggagtttcgccaggaagtaactgggagcagtgcagtgtctcccattcgcaagacagccagtcagcgccgctcctggcaggatttaattgagacgccactgacaagttcaggcttacactatcttcagactctgcccctggaggattctgtcttctctgactccgcggccatctccccagagcacaggcggcagtctaccctgccaactcagaaatgccacctgcaggatcactatgggccataccccttagctgagagtgagaggatgcaagtgctaaatggaaatgggggcaagcctcgaagttttactctgcctcgagatagcgggttcaaccattgctgtctgaatgctccagttagtgcctgtgacccacaggatgacgtgcaacccccagaggtggaggaagaggaggaggaggaggaggaggaaggggaggcagcaggggaaaacataggagaaaaaagtgaaagcagagaagaaaagttaggagactcattgcaagatttatacagggcactggagcaggccagtctgtcaccactaggagaacatcgtatttcaaccaagatggaatacaagctatcatttataaaaagatgtaatgatcctgtaatgaatgaaaaactacaccggctgagaattctcaaaagcactttaaaggccagagaaggggaagtagccattatcgataaagtcctagacaatccagacttgacatctaaagaattccaacaatggaagcagatgtacctcgaccttttcttggatatctgtcaaaataccacctcaaatgacccactgagtatttcttctgaagtagatgtaatcacttcctctctagcacacactcattcatacattgaaacgcatgtctaaatgtattctgccttcagaccatctagtacctgctggtactctgaacaagtatataaggtagtttttatatcaatgtgtggaacacttgacaagctatactttaatgttaccaaactatatgaaacaaaccatatatggtcacaataccactatctttaatgagcatttgtatattttatatgcaacagtgctcagcttatgtttaccatgtgcaaaatcaactgtctttaatgacttaaaattaacttttgcaaacaattctaaatacaggtggtcttcaagtagtaaaaccacaaaaggcagttttctatctatggtcatcttttctccctttaagttaattttatataaacaagacttcaaaagtaaatcacattttttcaggtgcagacatccttgtgggtgggaaagaatttaaaccttttttatatttattaaaatgttctaagaattttcttaaacattgcacaaagtttaatgctgtagttttatttttgtgaaatgtagatgcgcatacaagagctaagcaaaatagaagagcatcgacataagaaaagttcaggtatctaatattcgtcttaatagtctattaacttgtgaaagctaagttaatggaaatattattccaaatctatgagaacacttggtgtatcagggcaaagctttgtaagatgtttttgtaactaagaccaaaattgaagatagagctgctttattttcttggtttaaatcttcctttatttttgtagtgatgagatgctgattgtgtacagaagaatttgagaggggatttttaaaaactgacttaacacacccagaaaggcagctaacagctatatatatatataaatttcagcccaaactcatgtttttaaactccaactcttaaaagacaacaaggtataaactgaaatgaatcaactttccacttagtttccaattttcccctagtccactaattaaacttaggtaattatacttcaggtagggaagtacaatatgtttagtttcaggctgatgtgtgttataaaaaacaacactgaaaaataaaaatgtacttcccttctaaggagcaagcaggtgatggtcattcaaagagatgtcacattgaattatgagagaaacaatttagaggtttttttcctggcttcatgaattgttctatagagtggatgaagtctaaggaaaagtcctcttcatatatttccatttataagcgtcttgtttttgaaagtgatcacagcatgaaaatgactgtgctgctttttagtgtctggctgcataatgtacaagtcacaatttgctgtttttttcaggaggagaaagggaacctcctttactattctatatcctaaaatctacttctaatcagctttatactgttgcctgtacagctcagtgaatgtactttcatctttaagagttcagatatatgccagtgaatatttttgctgtagaggagaaagtaaaaactccacagcggggatctttttctttgcttttgaaaccaccattgaatcactatcgttttgcagactttgcacaactgtacaggagagtggcctttctacagcacattttcagtaatcctatatttagtcaaaatggatgagaaatcatgtattaatgtttgtatggaattttgggtccagtgtaatatttttatcatttaaaaagaactctatttgtaaaaacatttatttactgcatggatattgacgcacattaaatttgtgggattttgtatatgtaaaaaaaaaaaaaaaaaaaaaacaaaaaacctcttgtcctaaaatgaagtgtgcttgttaacaggtgtttagacttattgatgtttactagaccaaatgtgtatgttcacttaaaaatatatgtacctgatggatgtgtcatgtttacagtggccaggttgtggcctgtaaacagcaagcagttgacgggaagactagctctgttgctactaagcagcttttacttttgtaaagtcagctctgttgttttaaatggtaaaaattaaactaatgaatttgacaagactcgtggctagcctagcatgaaagagaccttttaacactatataatatctgtacattttattgcattcgtttcaaatctaggagagaggcagcactgtaaactgaagtcaaataaattcagctcttaatgaatccttaaaaaaaaaaa

SEQ ID NO: 238 - DNA, 3778 bp, Homo sapiens
  gene (1)..(3778): Accession No. NM_001903
ccatttcctcctcctagccggactggagggagacaaagcagcgcccgtctgcttcgggcctctggaatttagcgctcgcccagctagccgcagaaatgactgctgtccatgcaggcaacataaacttcaagtgggatcctaaaagtctagagatcaggactctggcagttgagagactgttggagcctcttgttacacaggttacaacccttgtaaacaccaatagtaaagggccctctaataagaagagaggtcgttctaagaaggcccatgttttggctgcatctgttgaacaagcaactgagaatttcttggagaagggggataaaattgcgaaggagagccagtttctcaaggaggagcttgtggctgctgtagaagatgttcgaaaacaaggtgatttgatgaaggctgctgcaggagagttcgcagatgatccctgctcttctgtgaagcgaggcaacatggttcgggcagctcgagctttgctctctgctgttacccggttgctgattttggctgacatggcagatgtctacaaattacttgttcagctgaaagttgtggaagatggtatcttgaagttgaggaatgctggcaatgaacaagacttaggaatccagtataaagccctaaaacctgaagtggataagctgaacattatggcagccaaaagacaacaggaattgaaagatgttggccatcgtgatcagatggctgcagctagaggaatcctgcagaagaacgttccgatcctctatactgcatcccaggcatgcctacagcaccctgatgtcgcagcctataaggccaacagggacctgatatacaagcagctgcagcaggcggtcacaggcatttccaatgcagcccaggccactgcctcagacgatgcctcacagcaccagggtggaggaggaggagaactggcatatgcactcaataactttgacaaacaaatcattgtggaccccttgagcttcagcgaggagcgctttaggccttccctggaggagcgtctggaaagcatcattagtggggctgccttgatggccgactcgtcctgcacgcgtgatgaccgtcgtgagcgaattgtggcagagtgtaatgctgtccgccaggccctgcaggacctgctttcggagtacatgggcaatgctggacgtaaagaaagaagtgatgcactcaattctgcaatagataaaatgaccaagaagaccagggacttgcgtagacagctccgcaaagctgtcatggaccacgtttcagattctttcctggaaaccaatgttccacttttggtattgattgaagctgcaaagaatggaaatgagaaagaagttaaggagtatgcccaagttttccgtgaacatgccaacaaattgattgaggttgccaacttggcctgttccatctcaaataatgaagaaggtgtaaagcttgttcgaatgtctgcaagccagttagaagccctctgtcctcaggttattaatgctgcactggctttagcagcaaaaccacagagtaaactggcccaagagaacatggatctttttaaagaacaatgggaaaaacaagtccgtgttctcacagatgctgtcgatgacattacttccattgatgacttcttggctgtctcagagaatcacattttggaagatgtgaacaaatgtgtcattgctctccaagagaaggatgtggatggcctggaccgcacagctggtgcaattcgaggccgggcagcccgggtcattcacgtagtcacctcagagatggacaactatgagccaggagtctacacagagaaggttctggaagccactaagctgctctccaacacagtcatgccacgttttactgagcaagtagaagcagccgtggaagccctcagctcggaccctgcccagcccatggatgagaatgagtttatcgatgcttcccgcctggtatatgatggcatccgggacatcaggaaagcagtgctgatgataaggacccctgaggagttggatgactctgactttgagacagaagattttgatgtcagaagcaggacgagcgtccagacagaagacgatcagctgatagctggccagagtgcccgggcgatcatggctcagcttccccaggagcaaaaagcgaagattgcggaacaggtggccagcttccaggaagaaaagagcaagctggatgctgaagtgtccaaatgggacgacagtggcaatgacatcattgtgctggccaagcagatgtgcatgattatgatggagatgacagactttacccgaggtaaaggaccactcaaaaatacatcggatgtcatcagtgctgccaagaaaattgctgaggcaggatccaggatggacaagcttggccgcaccattgcagaccattgccccgactcggcttgcaagcaggacctgctggcctacctgcaacgcatcgccctctactgccaccagctgaacatctgcagcaaggtcaaggccgaggtgcagaatctcggcggggagcttgttgtctctggggtggacagcgccatgtccctgatccaggcagccaagaacttgatgaatgctgtggtgcagacagtgaaggcatcctacgtcgcctctaccaaataccaaaagtcacagggtatggcttccctcaaccttcctgctgtgtcatggaagatgaaggcaccagagaaaaagccattggtgaagagagagaaacaggatgagacacagaccaagattaaacgggcatctcagaagaagcacgtgaacccggtgcaggccctcagcgagttcaaagctatggacagcatctaagtctgcccaggccggccgcccccacccctcggggctcctgaatatcagtcactgttcgtcactcaaatgaatttgctaaatacaacactgatactagattccacagggaaatgggcagactgaaccagtccaggtggtgaattttccaagaacatagtttaagttgattaaaaatgcttttagaatgcaggagcctacttctagctgtattttttgtatgcttaaataaaaataaaaattcataaccaaagagaatcccacattagcttgttagtaatgctctgaccaagccgagatgcccattctcttagtgatggcggcgttagggtttgagagaagggaatttggctcaacttcagttgagagggtgcagtccagacagcttgactgcttttaaatgaccaaagatgacctgtggtaagcaacctgggcatcttaggaagcagtccctggagaaggcatgttcccagaaaggtctctggagggacaaactcactcagtaaaacataatgtatcatgaagaaaactgattctctatgacatgaaatgaaaattttaatgcattgttataattactaatgtacgctgctgcaggacattaataaagttgcttttttaggctacagtgtctcgatgccataatcagaacacactttttttcctctttctcccagcttcaaatgcaaattcatcattgggctcacttctaataactgcagtgtttcccgccttgggcttgcagcagaaaaacctgacaacatagtgtttgctaaggcagtaatttagactttaccttatttgtgattactgtagtgattgattgattgattactattaactacaaggtataatttactatcaccttatttaaattttatgaattaatttgaatgttttttacactaactaacttttcccaataaagtccactatgaaaccacgacaaaaaaaaaaaaaaaaaa

SEQ ID NO: 239 - DNA, 2205 bp, Homo sapiens
  gene (1)..(2205): Accession No. NM_001909
gcgcacgccggccgcgcccacgtgaccggtccgggtgcaaacacgcgggtcagctgatccggcccaactgcggcgtcatcccggctataagcgcacggcctcggcgaccctctccgacccggccgccgccgccatgcagccctccagccttctgccgctcgccctctgcctgctggctgcacccgcctccgcgctcgtcaggatcccgctgcacaagttcacgtccatccgccggaccatgtcggaggttgggggctctgtggaggacctgattgccaaaggccccgtctcaaagtactcccaggcggtgccagccgtgaccgaggggcccattcccgaggtgctcaagaactacatggacgcccagtactacggggagattggcatcgggacgcccccccagtgcttcacagtcgtcttcgacacgggctcctccaacctgtgggtcccctccatccactgcaaactgctggacatcgcttgctggatccaccacaagtacaacagcgacaagtccagcacctacgtgaagaatggtacctcgtttgacatccactatggctcgggcagcctctccgggtacctgagccaggacactgtgtcggtgccctgccagtcagcgtcgtcagcctctgccctgggcggtgtcaaagtggagaggcaggtctttggggaggccaccaagcagccaggcatcaccttcatcgcagccaagttcgatggcatcctgggcatggcctacccccgcatctccgtcaacaacgtgctgcccgtcttcgacaacctgatgcagcagaagctggtggaccagaacatcttctccttctacctgagcagggacccagatgcgcagcctgggggtgagctgatgctgggtggcacagactccaagtattacaagggttctctgtcctacctgaatgtcacccgcaaggcctactggcaggtccacctggaccaggtggaggtggccagcgggctgaccctgtgcaaggagggctgtgaggccattgtggacacaggcacttccctcatggtgggcccggtggatgaggtgcgcgagctgcagaaggccatcggggccgtgccgctgattcagggcgagtacatgatcccctgtgagaaggtgtccaccctgcccgcgatcacactgaagctgggaggcaaaggctacaagctgtccccagaggactacacgctcaaggtgtcgcaggccgggaagaccctctgcctgagcggcttcatgggcatggacatcccgccacccagcgggccactctggatcctgggcgacgtcttcatcggccgctactacactgtgtttgaccgtgacaacaacagggtgggcttcgccgaggctgcccgcctctagttcccaaggcgtccgcgcgccagcacagaaacagaggagagtcccagagcaggaggcccctggcccagcggcccctcccacacacacccacacactcgcccgcccactgtcctgggcgccctggaagccggcggcccaagcccgacttgctgttttgttctgtggttttcccctccctgggttcagaaatgctgcctgcctgtctgtctctccatctgtttggtgggggtagagctgatccagagcacagatctgtttcgtgcattggaagaccccacccaagcttggcagccgagctcgtgtatcctggggctcccttcatctccagggagtcccctccccggccctaccagcgcccgctgggctgagcccctaccccacaccaggccgtcctcccgggccctcccttggaaacctgccctgcctgagggcccctctgcccagcttgggcccagctgggctctgccaccctacctgttcagtgtcccgggcccgttgaggatgaggccgctagaggcctgaggatgagctggaaggagtgagaggggacaaaacccaccttgttggagcctgcagggtggtgctgggactgagccagtcccaggggcatgtattggcctggaggtggggttgggattgggggctggtgccagccttcctctgcagctgacctctgttgtcctccccttgggcggctgagagccccagctgacatggaaatacagttgttggcctccggcctcccctcaaaaaaaaaaaaaaaaaaaaaaaaaaaaaaaaaaaaaaaaaaaaaaaaaaaaaaaaaaaaaaaaaaaaaaaaaaaaaaaaaaaaa

SEQ ID NO: 240 - DNA, 711 bp, Homo sapiens
  gene (1)..(711): Accession No. NM_001344
atgcgcaaacagcacatccggtgtggtcgacgggtcctccaagagtttggggcgcggactggagtaccttgcgtgcagttatgtcggcgtcggtagtgtctgtcatttcgcggttcttagaagagtacttgagctccactccgcagcgtctgaagttgctggacgcgtacctgctgtatatactgctgaccggggcgctgcagttcggttactgtctcctcgtggggaccttccccttcaactcttttctctcgggcttcatctcttgtgtggggagtttcatcctagcggtttgcctgagaatacagatcaacccacagaacaaagcggatttccaaggcatctccccagagcgagcctttgctgattttctctttgccagcaccatcctgcaccttgttgtcatgaactttgttggctgactcattctcatttacttaattgaggagtaggagactaaaagaatgttcactctttgaatttcctggataagagttctggagatggcagcttattggacacatggattttcttcagatttgcacttactgctagctctgctttttatgcaggagaaaagcccagagttcactgtgtgtcagaacaactttctaacaaacatttattaatccagcctctgcctttcattaaatgtaaccttttgccttccaaattaaagaactccatgccactcctcaaaaaaaaaaaaaa

SEQ ID NO: 241 - DNA, 2265 bp, Homo sapiens
  gene (1)..(2265): Accession No. NM_019887
acgcggaggttgtaattggtctctagaccacacctagttgttgagtgccgctgcttgaaaatctcagttctgccgagatcgcagaatacacacaagctacctttgggcaccagagcagacagaaccgcggagcttcagggtggaagattcgtggaaactttgccaaggccaggacctcgtgtgttcccgtccgcccctctgggacggcgccagcccggcaggccgccgaccgtcctggggctcccgcgcagcgcgatgccggcctcgtccaccgtccacgtgctgcagctgctgcgggagctgctcgccttcgtgctcctcagctacacggtgctcatcggggcgctgctgctggccggctggaccacttacttcctggtgctgaagtgacagcgccgtcgccgcgcccggccccgcctcccgcccggccccgcctcccgcccggccccgcctccctaactcaccaggaaattcccttcaagccctggcccgaactgagtccccgcccacccgccagcgtcacggcgcccgactcagctccgcgccggacccacctccgcgccctcaggccctgcatatgccccgccccgcgcggaagttccggcggttggttgccttgcgcggccgttacagcctttgccctaagcctcgccccctttccccctgcctgcccaatcccgactgcttccttgggtgggggcgtggctatggggcgaggcgctctcaggtggaggccgtgccccgctccgcgctcacgaagctgcgtcacttccggcgtgtgcgtctggcgtccgcgcgctgcacaatggcggctctgaagagttggctgtcgcgcagcgtaacttcattcttcaggtacagacagtgtttgtgtgttcctgttgtggctaactttaagaagcggtgtttctcagaattgataagaccatggcacaaaactgtgacgattggctttggagtaaccctgtgtgcggttcctattgcacagaaatcagagcctcattcccttagtagtgaagcattgatgaggagagcagtgtctttggtaacagatagcacctctacctttctctctcagaccacatatgcgttgattgaagctattactgaatatactaaggctgtttataccttaacttctctttaccgacaatatacaagtttacttgggaaaatgaattcagaggaggaagatgaagtgtggcaggtgatcataggagccagagctgagatgacttcaaaacaccaagagtacttgaagctggaaaccacttggatgactgcagttggtctttcagagatggcagcagaagctgcatatcaaactggcgcagatcaggcctctataaccgccaggaatcacattcagctggtgaaactgcaggtggaagaggtgcaccagctctcccggaaagcagaaaccaagctggcagaagcacagatagaagagctccgtcagaaaacacaggaggaaggggaggagcgggctgagtcggagcaggaggcctacctgcgtgaggattgagggcctgagcacactgccctgtctccccactcagtggggaaagcaggggcagatgccaccctgcccagggttggcatgactgtctgtgcaccgagaagaggcggcagatcctgccctggccaatcaggcgagacgcctttgtgagctgtgagtgcctcctgtggtctcaggcttgcgctggacctggttcttagcccttgggcactgcaccctgtttaacatttcaccccactctgtacagctgctcttacccattttttttacctcacacccaaagcattttgcctacctgggtcagagagaggagtcctttttgtcatgcccttaagttcagcaactgtttaacctgttttcagtcttatttacgtcgtcaaaaatgatttagtacttgttccctctgttgggatgccagttgtggcagggggaggggaacctgtccagtttgtacgatttctttgtatgtatttctgatgtgttctctgatctgcccccactgtcctgtgaggacagctgaggccaaggagtgaaaaacctattactactaagagaaggggtgcagagtgtttacctggtgctctcaacaggacttaacatcaacaggacttaacacaggcctcttgttccttcctttctttccgtttctctattgtatccaaaggagaagagtgtaagattttgtttgcatctgaaagagaaaatgcgtctctcctggggtcctaaaaaaaaaaaaaaaaaaaaaa

SEQ ID NO: 242 - DNA, 7479 bp, Homo sapiens
  gene (1)..(7479): Accession No. NM_182643
tcctcagaggcaggaaatactttccaggcaatctgggcctggttgtggaggccccttttgcaaaacctcagtctgaatttagtagacagaagtcactaggaatgccttgacaggatcctgccttagctaaggctccctccagctgcagagggtgtttttgttagactcacacactgcgtgaaactgctcagaatagagccatgatctcaaccacgaaatgggaacttagattttggagaaactaacggggacggacttctttcctagcctgagtgttgagcagtgtcatgccttggcgtttcagctcctcgttgtctaggtggtgaaatgacagaactcattcgcttctttgattggtgattttgaaataatctttcatcaagttccatctcctttaccctcatatggaatatatctctctgtctgttgttaaactacgatgacatgtctgtagctatcagaaagagaagctgggaagaacatgtgacccactggatgggacagccttttaattctgatgatcgtaacacagcatgtcatcatggactagtagctgacagcttgcaggcaagtatggaaaaagatgcaactctaaatgtggaccgcaaagagaagtgtgtttcactacctgactgctgtcatggatcagagctgagagattttcctgggaggccaatgggtcatctttcaaaggatgtggacgaaaatgacagccatgaaggtgaagatcagtttctttctctggaagccagcacagaaacactagtgcatgtttctgatgaggataacaatgctgatttatgccttacagatgataaacaggttttaaatacccaagggcagaaaacatcaggccaacatatgatccaaggagcaggctccttagaaaaggcactgcccatcatacaaagtaaccaagtttcttctaactcctggggaatagctggtgaaactgaattagcactggtaaaagaaagtggggagagaaaagttactgactctataagtaaaagcctggagctttgcaatgaaataagcttaagtgaaataaaagatgcacccaaagtaaatgcagtggatactttgaacgtgaaagatattgcacctgagaaacaattgcttaactctgctgtaattgctcagcaacgaaggaaacctgacccccctaaagatgaaaatgaaagaagcacctgcaatgtagtacaaaatgagttcttggatactccttgcacaaacagaggactgccattattaaaaacagattttggaagctgccttctgcagcctccttcctgccccaatggaatgtcagctgaaaatggcctggagaagagtggtttttcacaacatcaaaacaaaagtccaccaaaggtcaaggcagaagatggcatgcagtgtttacaattaaaggagaccctggccacccaggaacccacagataaccaagtcagacttcgtaagagaaaggaaataagagaagatcgagatagggcgcggctggactccatggtgctgctgattatgaaactggaccagcttgatcaggacatagaaaatgccctcagcaccagctcctctccatcaggcacaccaacaaacctgcggcggcacgttcctgatctggaatcaggatctgaaagtggagcagataccatttcagtaaatcagacacgagtaaatttgtcttctgacactgagtccacggacctcccatcttccactccagtagccaattctggaaccaaacccaagactacggctattcaaggtatttcagagaaggaaaaggctgaaattgaagccaaggaagcttgtgattggctacgggcaactggtttcccccagtatgcacagctttatgaagatttcctgttccccatcgatatttccttggtcaagagagagcatgattttttggacagagatgccattgaggctctatgcaggcgtctaaatactttaaacaaatgtgcggtgatgaagctagaaattagtcctcatcggaaacgaagtgacgattcagacgaggatgagccttgtgccatcagtggcaaatggactttccaaagggacagcaagaggtggtcccggcttgaagagtttgatgtcttttctccaaaacaagacctggtccctgggtccccagacgactcccacccgaaggacggccccagccccggaggcacgctgatggacctcagcgagcgccaggaggtgtcttccgtccgcagcctcagcagcactggcagcctccccagccacgcgccccccagcgaggatgctgccaccccccggactaactccgtcatcagcgtttgctcctccagcaacttggcaggcaatgacgactctttcggcagcctgccctctcccaaggaactgtccagcttcagcttcagcatgaaaggccacgaaaaaactgccaagtccaagacgcgcagtctgctgaaacggatggagagcctgaagctcaagagctcccatcacagcaagcacaaagcgccctcaaagctggggttgatcatcagcgggcccatcttgcaagaggggatggatgaggagaagctgaagcagctcaactgcgtggagatctccgccctcaatggcaaccgcatcaacgtccccatggtacgaaagaggagcgtttccaactccacgcagaccagcagcagcagcagccagtcggagaccagcagcgcggtcagcacgcccagccctgttacgaggacccggagcctcagtgcgtgcaacaagcgggtgggcatgtacttagagggcttcgatcctttcaatcagtcaacatttaacaacgtggtggagcagaactttaagaaccgcgagagctacccagaggacacggtgttctacatccctgaagatcacaagcctggcactttccccaaagctctcaccaatggcagtttctccccctcggggaataacggctctgtgaactggaggacgggaagcttccacggccctggccacatcagcctcaggagggaaaacagtagcgacagccccaaggaactgaagagacgcaattcttccagctccatgagcagccgcctgagcatctacgacaacgtgccgggctccatcctctactccagttcaggggacctggcggatctggagaacgaggacatcttccccgagctggacgacatcctctaccacgtgaaggggatgcagcggatagtcaatcagtggtcggagaagttttctgatgagggagattcggactcagccctggactcggtctctccctgcccgtcctctccaaaacagatacacctggatgtggacaacgaccgaaccacacccagcgacctggacagcacaggcaactccctgaatgaaccggaagagccctccgagatcccggaaagaagggattctggggttggggcttccctaaccaggtccaacaggcaccgactgagatggcacagtttccagagctcacatcggccaagcctcaactctgtatcactacagattaactgccagtctgtggcccagatgaacctgctgcagaaatactcactcctaaagctaacggccctgctggagaaatacacaccttctaacaagcatggttttagctgggccgtgcccaagttcatgaagaggatcaaggttccagactacaaggaccggagtgtgtttggggtcccactgacggtcaacgtgcagcgcacaggacaaccgttgcctcagagcatccagcaggccatgcgatacctccggaaccattgtttggatcaggttgggctcttcagaaaatcgggggtcaagtcccggattcaggctctgcgccagatgaatgaaggtgccatagactgtgtcaactacgaaggacagtctgcttatgacgtggcagacatgctgaagcagtattttcgagatcttcctgagccactaatgacgaacaaactctcggaaacctttctacagatctaccaatatgtgcccaaggaccagcgcctgcaggccatcaaggctgccatcatgctgctgcctgacgagaaccgggaggttctgcagaccctgctttatttcctgagcgatgtcacagcagccgtaaaagaaaaccagatgaccccaaccaacctggccgtgtgcttagcgccttccctcttccatctcaacaccctgaagagagagaattcctctcccagggtaatgcaaagaaaacaaagtttgggcaaaccagatcagaaagatttgaatgaaaacctagctgccactcaagggctggcccatatgatcgccgagtgcaagaagcttttccaggttcccgaggaaatgagccgatgtcgtaattcctataccgaacaagagctgaagcccctcactctggaagcactcgggcacctgggtaatgatgactcagctgactaccaacacttcctccaggactgtgtggatggcctgtttaaagaagtcaaagagaagtttaaaggctgggtcagctactccacttcggagcaggctgagctgtcctataagaaggtgagcgaaggaccccctctgaggctttggaggtcagtcattgaagtccctgctgtgccagaggaaatcttaaagcgcctacttaaagaacagcacctctgggatgtagacctgttggattcaaaagtgatcgaaattctggacagccaaactgaaatttaccagtatgtccaaaacagtatggcacctcatcctgctcgagactacgttgttttaagaacctggaggactaatttacccaaaggagcctgtgcccttttactaacctctgtggatcacgatcgcgcacctgtggtgggtgtgagggttaatgtgctcttgtccaggtatttgattgaaccctgtgggccaggaaaatccaaactcacctacatgtgcagagttgacttaaggggccacatgccagaatggtacacaaaatcttttggacatttgtgtgcagctgaagttgtaaagatccgggattccttcagtaaccagaacactgaaaccaaagacaccaaatctaggtgatcactgaagcaacgcaaccgcttccaccaccatggtgtttgtttctagaacttttgccagtccttgaagaatgggttctgtgtctaatcctgaaacaaagaaaactacaagctggagtgtaggaattgactatagcaatttgatacatttttaaagctgcttcctgtttgttgagggtctgtattcatagaccttgactggaatatgtaagactgtgcaaaaaaaaaaaaaaaatttatgtgtattcttattcaaattgcttctgagaagcaaaactctttaaatacattatggaagataatgaagatacttcattctcttgtgatatcagtgtatgcgtacctgtgtcgctttatttgcagtgtgttgagggactggtgtatccactggaatagttggtactcttggatgtgttttctcaccaagatgagcaaagaaaggtttgcacagaggagtgtgaatgtgtgtttgttgctggctgaatggcaatagatgtctaaggtggattcagtgtctggcacactgagacacctccaagaaggagattgatgcatcaggttcagtttaacctggaatatctgactacccctgaatccacccagaaagggggcccaacacccttgtccatttatgggtattttttttcgaagttattaagcatattccttttccacgaacctcttctgtactttgattgtaataggttggctcttacacccattccaaatgcagtttatttttagacccgattgcaaatagtgatgtagttttaaccagtatggattagttcagggatgaactgctccctctagccttactggctctgatccacagggttttgttttgttttgttttgttttttgtttaagtcgagatataaaaactgaacacgataacacttactcttaaatcaagcatcaacactttttccctgttagaattctttgcatttttgtgtttgtaacagaaacgccttaagacactatgtttgggaatataggaaactatgtgtgtcccaaggaaatccctgtaaatttaactcacctacaaaaggctttttccccgcctttggttgttaacggcattcctgaaagccacatgtgtttattcattgggcttgttcttatcagcaaataggttttctggttttatgactttttgtcttattttatttttcctacatttctttttttttttttttcctttagaatgccctggaaatatatttaagtggtaatgaaaaatagtaatcatagtaaaacgcaacaagaagaaaaccaacccaaaccagtgaagttttttagaacctttagaagggtggtctttattcaggttttactgtaatggtaaggattgactcaagagacagtattagtaaatttattgtgtatggatcaaaagtgaataatgtatgaatgagagctgtaagaaggatttttattttgttataatttagttaccattttcagtgttatttcaaaggttctttgaagaattttggggcagggcatcagattagagttttaaaatttgagtattttggatatcagtgttcctcatgaagatatacatggatattcaattttgatggcttccagatttgtaagattgtatgttgtatataccattctattaagaaacatgtccactgtgctttcaaacatagataaagcatgataaagattattatttaagatatacttgtatttatacctcagatattcttttgggttttgtacctcaaggcttttttcttcttattgtaaatacactttacgtgaatacagtctaagtgaagaaaataaataaaaggaagaggtttataacttgctctatatctgtacagattataatcaataagtgcactattattaaatgtttaaagtaagggaaaagtctgggctgccttccttaatattgcatctcactcccacccttaaaaccacagattgcaaagcatagcattttagcatcaactacaatcaaaagagcgatttgctgaaggaaaaatcggactgcaaatcattccaaggccaaactgcaactgagccacccactcccaaacaggaaaccctggtgaaggttcaggaagcacggagattctctccaacaaaggtccagttaggaaacgacgctgagaggatgacgacaacgtgcaacagcagaaagatgcttgcaagcagagtcagggtcaccagtgaatgccacaaaagttctctttcccactgtttaatttgacaagagaagaatttgaaggatatgaacattttcaagaactctgctgaggtcacttagagcgccatcacaacttatttgtgtgactaattgcctagattgtaagctctttgagggcagggcttgtctcttacacatctttataatcccctgcagcggctttcagtattttgtacttgtaggcacctaataaatttattatttgctatactg

SEQ ID NO: 243 - DNA, 6330 bp, Homo sapiens
  gene (1)..(6330): Accession No. NM_000125
aggagctggcggagggcgttcgtcctgggactgcacttgctcccgtcgggtcgcccggcttcaccggacccgcaggctcccggggcagggccggggccagagctcgcgtgtcggcgggacatgcgctgcgtcgcctctaacctcgggctgtgctctttttccaggtggcccgccggtttctgagccttctgccctgcggggacacggtctgcaccctgcccgcggccacggaccatgaccatgaccctccacaccaaagcatctgggatggccctactgcatcagatccaagggaacgagctggagcccctgaaccgtccgcagctcaagatccccctggagcggcccctgggcgaggtgtacctggacagcagcaagcccgccgtgtacaactaccccgagggcgccgcctacgagttcaacgccgcggccgccgccaacgcgcaggtctacggtcagaccggcctcccctacggccccgggtctgaggctgcggcgttcggctccaacggcctggggggtttccccccactcaacagcgtgtctccgagcccgctgatgctactgcacccgccgccgcagctgtcgcctttcctgcagccccacggccagcaggtgccctactacctggagaacgagcccagcggctacacggtgcgcgaggccggcccgccggcattctacaggccaaattcagataatcgacgccagggtggcagagaaagattggccagtaccaatgacaagggaagtatggctatggaatctgccaaggagactcgctactgtgcagtgtgcaatgactatgcttcaggctaccattatggagtctggtcctgtgagggctgcaaggccttcttcaagagaagtattcaaggacataacgactatatgtgtccagccaccaaccagtgcaccattgataaaaacaggaggaagagctgccaggcctgccggctccgcaaatgctacgaagtgggaatgatgaaaggtgggatacgaaaagaccgaagaggagggagaatgttgaaacacaagcgccagagagatgatggggagggcaggggtgaagtggggtctgctggagacatgagagctgccaacctttggccaagcccgctcatgatcaaacgctctaagaagaacagcctggccttgtccctgacggccgaccagatggtcagtgccttgttggatgctgagccccccatactctattccgagtatgatcctaccagacccttcagtgaagcttcgatgatgggcttactgaccaacctggcagacagggagctggttcacatgatcaactgggcgaagagggtgccaggctttgtggatttgaccctccatgatcaggtccaccttctagaatgtgcctggctagagatcctgatgattggtctcgtctggcgctccatggagcacccagggaagctactgtttgctcctaacttgctcttggacaggaaccagggaaaatgtgtagagggcatggtggagatcttcgacatgctgctggctacatcatctcggttccgcatgatgaatctgcagggagaggagtttgtgtgcctcaaatctattattttgcttaattctggagtgtacacatttctgtccagcaccctgaagtctctggaagagaaggaccatatccaccgagtcctggacaagatcacagacactttgatccacctgatggccaaggcaggcctgaccctgcagcagcagcaccagcggctggcccagctcctcctcatcctctcccacatcaggcacatgagtaacaaaggcatggagcatctgtacagcatgaagtgcaagaacgtggtgcccctctatgacctgctgctggagatgctggacgcccaccgcctacatgcgcccactagccgtggaggggcatccgtggaggagacggaccaaagccacttggccactgcgggctctacttcatcgcattccttgcaaaagtattacatcacgggggaggcagagggtttccctgccacggtctgagagctccctggctcccacacggttcagataatccctgctgcattttaccctcatcatgcaccactttagccaaattctgtctcctgcatacactccggcatgcatccaacaccaatggctttctagatgagtggccattcatttgcttgctcagttcttagtggcacatcttctgtcttctgttgggaacagccaaagggattccaaggctaaatctttgtaacagctctctttcccccttgctatgttactaagcgtgaggattcccgtagctcttcacagctgaactcagtctatgggttggggctcagataactctgtgcatttaagctacttgtagagacccaggcctggagagtagacattttgcctctgataagcactttttaaatggctctaagaataagccacagcaaagaatttaaagtggctcctttaattggtgacttggagaaagctaggtcaagggtttattatagcaccctcttgtattcctatggcaatgcatccttttatgaaagtggtacaccttaaagcttttatatgactgtagcagagtatctggtgattgtcaattcattccccctataggaatacaaggggcacacagggaaggcagatcccctagttggcaagactattttaacttgatacactgcagattcagatgtgctgaaagctctgcctctggctttccggtcatgggttccagttaattcatgcctcccatggacctatggagagcagcaagttgatcttagttaagtctccctatatgagggataagttcctgatttttgtttttatttttgtgttacaaaagaaagccctccctccctgaacttgcagtaaggtcagcttcaggacctgttccagtgggcactgtacttggatcttcccggcgtgtgtgtgccttacacaggggtgaactgttcactgtggtgatgcatgatgagggtaaatggtagttgaaaggagcaggggccctggtgttgcatttagccctggggcatggagctgaacagtacttgtgcaggattgttgtggctactagagaacaagagggaaagtagggcagaaactggatacagttctgaggcacagccagacttgctcagggtggccctgccacaggctgcagctacctaggaacattccttgcagaccccgcattgccctttgggggtgccctgggatccctggggtagtccagctcttcttcatttcccagcgtggccctggttggaagaagcagctgtcacagctgctgtagacagctgtgttcctacaattggcccagcaccctggggcacgggagaagggtggggaccgttgctgtcactactcaggctgactggggcctggtcagattacgtatgcccttggtggtttagagataatccaaaatcagggtttggtttggggaagaaaatcctcccccttcctcccccgccccgttccctaccgcctccactcctgccagctcatttccttcaatttcctttgacctataggctaaaaaagaaaggctcattccagccacagggcagccttccctgggcctttgcttctctagcacaattatgggttacttcctttttcttaacaaaaaagaatgtttgatttcctctgggtgaccttattgtctgtaattgaaaccctattgagaggtgatgtctgtgttagccaatgacccaggtgagctgctcgggcttctcttggtatgtcttgtttggaaaagtggatttcattcatttctgattgtccagttaagtgatcaccaaaggactgagaatctgggagggcaaaaaaaaaaaaaaagtttttatgtgcacttaaatttggggacaattttatgtatctgtgttaaggatatgtttaagaacataattcttttgttgctgtttgtttaagaagcaccttagtttgtttaagaagcaccttatatagtataatatatatttttttgaaattacattgcttgtttatcagacaattgaatgtagtaattctgttctggatttaatttgactgggttaacatgcaaaaaccaaggaaaaatatttagtttttttttttttttttgtatacttttcaagctaccttgtcatgtatacagtcatttatgcctaaagcctggtgattattcatttaaatgaagatcacatttcatatcaacttttgtatccacagtagacaaaatagcactaatccagatgcctattgttggatactgaatgacagacaatcttatgtagcaaagattatgcctgaaaaggaaaattattcagggcagctaattttgcttttaccaaaatatcagtagtaatatttttggacagtagctaatgggtcagtgggttctttttaatgtttatacttagattttcttttaaaaaaattaaaataaaacaaaaaaaaatttctaggactagacgatgtaataccagctaaagccaaacaattatacagtggaaggttttacattattcatccaatgtgtttctattcatgttaagatactactacatttgaagtgggcagagaacatcagatgattgaaatgttcgcccaggggtctccagcaactttggaaatctctttgtatttttacttgaagtgccactaatggacagcagatattttctggctgatgttggtattgggtgtaggaacatgatttaaaaaaaaactcttgcctctgctttcccccactctgaggcaagttaaaatgtaaaagatgtgatttatctggggggctcaggtatggtggggaagtggattcaggaatctggggaatggcaaatatattaagaagagtattgaaagtatttggaggaaaatggttaattctgggtgtgcaccagggttcagtagagtccacttctgccctggagaccacaaatcaactagctccatttacagccatttctaaaatggcagcttcagttctagagaagaaagaacaacatcagcagtaaagtccatggaatagctagtggtctgtgtttcttttcgccattgcctagcttgccgtaatgattctataatgccatcatgcagcaattatgagaggctaggtcatccaaagagaagaccctatcaatgtaggttgcaaaatctaacccctaaggaagtgcagtctttgatttgatttccctagtaaccttgcagatatgtttaaccaagccatagcccatgccttttgagggctgaacaaataagggacttactgataatttacttttgatcacattaaggtgttctcaccttgaaatcttatacactgaaatggccattgatttaggccactggcttagagtactccttcccctgcatgacactgattacaaatactttcctattcatactttccaattatgagatggactgtgggtactgggagtgatcactaacaccatagtaatgtctaatattcacaggcagatctgcttggggaagctagttatgtgaaaggcaaatagagtcatacagtagctcaaaaggcaaccataattctctttggtgcaggtcttgggagcgtgatctagattacactgcaccattcccaagttaatcccctgaaaacttactctcaactggagcaaatgaactttggtcccaaatatccatcttttcagtagcgttaattatgctctgtttccaactgcatttcctttccaattgaattaaagtgtggcctcgtttttagtcatttaaaattgttttctaagtaattgctgcctctattatggcacttcaattttgcactgtcttttgagattcaagaaaaatttctattcttttttttgcatccaattgtgcctgaacttttaaaatatgtaaatgctgccatgttccaaacccatcgtcagtgtgtgtgtttagagctgtgcaccctagaaacaacatattgtcccatgagcaggtgcctgagacacagacccctttgcattcacagagaggtcattggttatagagacttgaattaataagtgacattatgccagtttctgttctctcacaggtgataaacaatgctttttgtgcactacatactcttcagtgtagagctcttgttttatgggaaaaggctcaaatgccaaattgtgtttgatggattaatatgcccttttgccgatgcatactattactgatgtgactcggttttgtcgcagctttgctttgtttaatgaaacacacttgtaaacctcttttgcactttgaaaaagaatccagcgggatgctcgagcacctgtaaacaattttctcaacctatttgatgttcaaataaagaattaaactaaa

SEQ ID NO: 244 - DNA, 2169 bp, Homo sapiens
  gene (1)..(2169): Accession No. NM_001437
ctcggtctttaaaaggaagaaggggcttatcgttaagtcgcttgtgatcttttcagtttctccagctgctggctttttggacacccactcccccgccaggaggcagttgcaagcgcggaggctgcgagaaataactgcctcttgaaacttgcagggcgaagagcaggcggcgagcgctgggccggggagggaccacccgagctgcgacgggctctggggctgcggggcagggctggcgcccggagcctgagctgcaggaggtgcgctcgctttcctcaacaggtggcggcggggcgcgcgccgggagaccccccctaatgcgggaaaagcacgtgtccgcattttagagaaggcaaggccggtgtgtttatctgcaagccattatacttgcccacgaatctttgagaacattataatgacctttgtgcctcttcttgcaaggtgttttctcagctgttatctcaagacatggatataaaaaactcaccatctagccttaattctccttcctcctacaactgcagtcaatccatcttacccctggagcacggctccatatacataccttcctcctatgtagacagccaccatgaatatccagccatgacattctatagccctgctgtgatgaattacagcattcccagcaatgtcactaacttggaaggtgggcctggtcggcagaccacaagcccaaatgtgttgtggccaacacctgggcacctttctcctttagtggtccatcgccagttatcacatctgtatgcggaacctcaaaagagtccctggtgtgaagcaagatcgctagaacacaccttacctgtaaacagagagacactgaaaaggaaggttagtgggaaccgttgcgccagccctgttactggtccaggttcaaagagggatgctcacttctgcgctgtctgcagcgattacgcatcgggatatcactatggagtctggtcgtgtgaaggatgtaaggccttttttaaaagaagcattcaaggacataatgattatatttgtccagctacaaatcagtgtacaatcgataaaaaccggcgcaagagctgccaggcctgccgacttcggaagtgttacgaagtgggaatggtgaagtgtggctcccggagagagagatgtgggtaccgccttgtgcggagacagagaagtgccgacgagcagctgcactgtgccggcaaggccaagagaagtggcggccacgcgccccgagtgcgggagctgctgctggacgccctgagccccgagcagctagtgctcaccctcctggaggctgagccgccccatgtgctgatcagccgccccagtgcgcccttcaccgaggcctccatgatgatgtccctgaccaagttggccgacaaggagttggtacacatgatcagctgggccaagaagattcccggctttgtggagctcagcctgttcgaccaagtgcggctcttggagagctgttggatggaggtgttaatgatggggctgatgtggcgctcaattgaccaccccggcaagctcatctttgctccagatcttgttctggacagggatgaggggaaatgcgtagaaggaattctggaaatctttgacatgctcctggcaactacttcaaggtttcgagagttaaaactccaacacaaagaatatctctgtgtcaaggccatgatcctgctcaattccagtatgtaccctctggtcacagcgacccaggatgctgacagcagccggaagctggctcacttgctgaacgccgtgaccgatgctttggtttgggtgattgccaagagcggcatctcctcccagcagcaatccatgcgcctggctaacctcctgatgctcctgtcccacgtcaggcatgcgagtaacaagggcatggaacatctgctcaacatgaagtgcaaaaatgtggtcccagtgtatgacctgctgctggagatgctgaatgcccacgtgcttcgcgggtgcaagtcctccatcacggggtccgagtgcagcccggcagaggacagtaaaagcaaagagggctcccagaacccacagtctcagtgacgcctggccctgaggtgaactggcccacagaggtcacaggctgaagcgtgaactccagtgtgtcaggagcctgggcttcatctttctgctgtgtggtccctcatttgg

SEQ ID NO: 245 - DNA, 3672 bp, Homo sapiens
  gene (1)..(3672): Accession No. NM_005239
gcccggttacttcctccagagactgacgagtgcggtgtcgctccagctcagagctcccggagccgcccggccagcgtccggcctccctgatcgtctctggccggcgccctcgccctcgcccggcgcgcaccgagcagccgcgggcgccgagcagccaccgtcccgaccaagcgccggccctgcccgcagcggcaggatgaatgatttcggaatcaagaatatggaccaggtagcccctgtggctaacagttacagagggacactcaagcgccagccagcctttgacacctttgatgggtccctgtttgctgtttttccttctctaaatgaagagcaaacactgcaagaagtgccaacaggcttggattccatttctcatgactccgccaactgtgaattgcctttgttaaccccgtgcagcaaggctgtgatgagtcaagccttaaaagctaccttcagtggcttcaaaaaggaacagcggcgcctgggcattccaaagaacccctggctgtggagtgagcaacaggtatgccagtggcttctctgggccaccaatgagttcagtctggtgaacgtgaatctgcagaggttcggcatgaatggccagatgctgtgtaaccttggcaaggaacgctttctggagctggcacctgactttgtgggtgacattctctgggaacatctggagcaaatgatcaaagaaaaccaagaaaagacagaagatcaatatgaagaaaattcacacctcacctccgttcctcattggattaacagcaatacattaggttttggcacagagcaggcgccctatggaatgcagacacagaattaccccaaaggcggcctcctggacagcatgtgtccggcctccacacccagcgtactcagctctgagcaggagtttcagatgttccccaagtctcggctcagctccgtcagcgtcacctactgctctgtcagtcaggacttcccaggcagcaacttgaatttgctcaccaacaattctgggactcccaaagaccacgactcccctgagaacggtgcggacagcttcgagagctcagactccctcctccagtcctggaacagccagtcgtccttgctggatgtgcaacgggttccttccttcgagagcttcgaagatgactgcagccagtctctctgcctcaataagccaaccatgtctttcaaggattacatccaagagaggagtgacccagtggagcaaggcaaaccagttatacctgcagctgtgctggccggcttcacaggaagtggacctattcagctgtggcagtttctcctggagctgctatcagacaaatcctgccagtcattcatcagctggactggagacggatgggagtttaagctcgccgaccccgatgaggtggcccgccggtggggaaagaggaaaaataagcccaagatgaactacgagaagctgagccggggcttacgctactattacgacaagaacatcatccacaagacgtcggggaagcgctacgtgtaccgcttcgtgtgcgacctccagaacttgctggggttcacgcccgaggaactgcacgccatcctgggcgtccagcccgacacggaggactgaggtcgccgggaccaccctgagccggccccaggctcgtggactgagtgggaagcccatcctgaccagctgctccgaggacccaggaaaggcaggattgaaaatgtccaggaaagtggccaagaagcagtggccttattgcatcccaaaccacgcctcttgaccaggctgcctcccttgtggcagcaacggcacagctaattctactcacagtgcttttaagtgaaaatggtcgagaaagaggcaccaggaagccgtcctggcgcctggcagtccgtgggacgggatggttctggctgtttgagattctcaaaggagcgagcatgtcgtggacacacacagactatttttagattttcttttgccttttgcaaccaggaacagcaaatgcaaaaactctttgagagggtaggagggtgggaaggaaacaaccatgtcatttcagaagttagtttgtatatattattataatcttataattgttctcagaatcccttaacagttgtatttaacagaaattgtatattgtaatttaaaataattatataactgtatttgaaataagaattcagacatctgaggttttatttcatttttcaatagcacatatggaattttgcaaagatttaatctgccaagggccgactaagagaagttgtaaagtatgtattatttacatttaatagacttacagggataaggcctgtggggggtaatccctgctttttgtgtttttttgtttgtttgtttgtttgtttttggggggttttcttgccttggttgtctggcaaggactttgtacatttgggagtttttatgagaaacttaaatgttattatctgggcttatatctggcctctgctttctcctttaattgtaaagtaaaagctataaagcagtatttttcttgacaaatggcatatgttttccacttctttgcatgcgtttaagtcagtttatacacaaaatggattttattttttagtttaactgtgtttctccgacagctcacctctctctgaccacccagccatttccttcctgtgctccacgttcttctgtgtgattaaaataagaatattatttttggaaatatgcaactccttttcagagatcaggagggatttatgtagcagctatttttactgcaaaagtaattcactggaaaaaaaatgtaatttgtaagaaagctttatttttatctcagctctatgtaaagttaaagttactgtacagagctgaaggacggggggcggtaggggtcttgatgaaacctcttgaacgaagcacagtttgtcccatctttgttcactcgtgtgtctcaaccatcttaatagcatgctgctcctttttgctcagtgtccacagcaagatgacgtgattcttattttcttggacacagactattctgaggcacagagcggggacttaagatgggaaagagaaagcatcggagccattcattcggagaaaacgttttgatcaaaatggagacttttgtagtcgtttcaaaagagcacctgagtcatgtgtattcccggcctttataaatgacccggtcaagttggtttcaaagtccgacaggcttgtctgtttactagctgcgtggccttggacgggtggctgacatctgtaaagaatcctcctgtgatgaaactgaggaatcgggtggccgggcaagctgggaagagcaaagccagagctgcgctgcctcaatacccacaaaagaccattcccagtatacataagcacaggatgtttttctcaagagggatgtatttatcacttggacatctgtttataatataaacagacatgtgactgggaacatcttgctgccaaaagaatcctaggcagtggctcattgtatgtgaggttgaaccacgtgaaattgccaatattaggctggcttttatctacaaagaaggagtttcatggggttcagcctaacagttatggaaactacagtccttataaaccattggcatggtaataaacagatcttaagtataaaaattttgtaattgggcctttactctctcaataataaagtattttgtttatataaa

SEQ ID NO: 246 - DNA, 2395 bp, Homo sapiens
  gene (1)..(2395): Accession No. NM_000402
agaggcaggggctggcctgggatgcgcgcgcacctgccctcgccccgccccgcccgcacgaggggtggtggccgaggccccgccccgcacgcctcgcctgaggcgggtccgctcagcccaggcgcccgcccccgcccccgccgattaaatgggccggcggggctcagcccccggaaacggtcgtacacttcggggctgcgagcgcggagggcgacgacgacgaagcgcagacagcgtcatggcagagcaggtggccctgagccggacccaggtgtgcgggatcctgcgggaagagcttttccagggcgatgccttccatcagtcggatacacacatattcatcatcatgggtgcatcgggtgacctggccaagaagaagatctaccccaccatctggtggctgttccgggatggccttctgcccgaaaacaccttcatcgtgggctatgcccgttcccgcctcacagtggctgacatccgcaaacagagtgagcccttcttcaaggccaccccagaggagaagctcaagctggaggacttctttgcccgcaactcctatgtggctggccagtacgatgatgcagcctcctaccagcgcctcaacagccacatgaatgccctccacctggggtcacaggccaaccgcctcttctacctggccttgcccccgaccgtctacgaggccgtcaccaagaacattcacgagtcctgcatgagccagataggctggaaccgcatcatcgtggagaagcccttcgggagggacctgcagagctctgaccggctgtccaaccacatctcctccctgttccgtgaggaccagatctaccgcatcgaccactacctgggcaaggagatggtgcagaacctcatggtgctgagatttgccaacaggatcttcggccccatctggaaccgggacaacatcgcctgcgttatcctcaccttcaaggagccctttggcactgagggtcgcgggggctatttcgatgaatttgggatcatccgggacgtgatgcagaaccacctactgcagatgctgtgtctggtggccatggagaagcccgcctccaccaactcagatgacgtccgtgatgagaaggtcaaggtgttgaaatgcatctcagaggtgcaggccaacaatgtggtcctgggccagtacgtggggaaccccgatggagagggcgaggccaccaaagggtacctggacgaccccacggtgccccgcgggtccaccaccgccacttttgcagccgtcgtcctctatgtggagaatgagaggtgggatggggtgcccttcatcctgcgctgcggcaaggccctgaacgagcgcaaggccgaggtgaggctgcagttccatgatgtggccggcgacatcttccaccagcagtgcaagcgcaacgagctggtgatccgcgtgcagcccaacgaggccgtgtacaccaagatgatgaccaagaagccgggcatgttcttcaaccccgaggagtcggagctggacctgacctacggcaacagatacaagaacgtgaagctccctgacgcctacgagcgcctcatcctggacgtcttctgcgggagccagatgcacttcgtgcgcagcgacgagctccgtgaggcctggcgtattttcaccccactgctgcaccagattgagctggagaagcccaagcccatcccctatatttatggcagccgaggccccacggaggcagacgagctgatgaagagagtgggtttccagtatgagggcacctacaagtgggtgaacccccacaagctctgagccctgggcacccacctccacccccgccacggccaccctccttcccgccgcccgaccccgagtcgggaggactccgggaccattgacctcagctgcacattcctggccccgggctctggccaccctggcccgcccctcgctgctgctactacccgagcccagctacattcctcagctgccaagcactcgagaccatcctggcccctccagaccctgcctgagcccaggagctgagtcacctcctccactcactccagcccaacagaaggaaggaggagggcgcccattcgtctgtcccagagcttattggccactgggtctcactcctgagtggggccagggtgggagggagggacaagggggaggaaaggggcgagcacccacgtgagagaatctgcctgtggccttgcccgccagcctcagtgccacttgacattccttgtcaccagcaacatctcgagccccctggatgtcccctgtcccaccaactctgcactccatggccaccccgtgccacccgtaggcagcctctctgctataagaaaagcagacgcagcagctgggacccctcccaacctcaatgccctgccattaaatccgcaaacagcc

SEQ ID NO: 247 - DNA, 3147 bp, Homo sapiens
  gene (1)..(3147): Accession No. NM_002074
aggcgtctgaggggcggacggaggcggcggcggcggcggcgggagcgggagcgggcggcgagtggggagcggggccgggagtggagcagccgccgcggcgggactggaccgagcctcgccggcgcgcacctgcccgcagcgcccgcggagcgcgcagcgcggcccgagcgcgacgacctgccgagcggcggccgaggcggcggtgtgggcgcgtcaggccgcgacgagggcgctgagacaaatttacatgtattggagaccagaccagaagcccttctgaattaagatctcacattcttgaaggtggcattgaagagcactaagatcggaagatgagtgagcttgaccagttacggcaggaggccgagcaacttaagaaccagattcgagacgccaggaaagcatgtgcagatgcaactctctctcagatcacaaacaacatcgacccagtgggaagaatccaaatgcgcacgaggaggacactgcgggggcacctggccaagatctacgccatgcactggggcacagactccaggcttctcgtcagtgcctcgcaggatggtaaacttatcatctgggacagctacaccaccaacaaggtccacgccatccctctgcgctcctcctgggtcatgacctgtgcatatgccccttctgggaactatgtggcctgcggtggcctggataacatttgctccatttacaatctgaaaactcgtgaggggaacgtgcgcgtgagtcgtgagctggcaggacacacaggttacctgtcctgctgccgattcctggatgacaatcagatcgtcaccagctctggagacaccacgtgtgccctgtgggacatcgagaccggccagcagacgaccacgtttaccggacacactggagatgtcatgagcctttctcttgctcctgacaccagactgttcgtctctggtgcttgtgatgcttcagccaaactctgggatgtgcgagaaggcatgtgccggcagaccttcactggccacgagtctgacatcaatgccatttgcttctttccaaatggcaatgcatttgccactggctcagacgacgccacctgcaggctgtttgaccttcgtgctgaccaggagctcatgacttactcccatgacaacatcatctgcgggatcacctctgtctccttctccaagagcgggcgcctcctccttgctgggtacgacgacttcaactgcaacgtctgggatgcactcaaagccgaccgggcaggtgtcttggctgggcatgacaaccgcgtcagctgcctgggcgtgactgacgatggcatggctgtggcgacagggtcctgggatagcttcctcaagatctggaactaacgccagtagcatgtggatgccatggagactggaagaccattccaacttggacgcgttaccatgagagcatatcctatccaaccgtactaacgtggacaccctacacctcccctcagaacttcaaaagggcaagatcttttttccttcacttattgctgaaaccaagagcacaattcccattgagagaaagatctctgtgctgtaaactaaaacaaattgtgcattccttccggggccatcgtctttgttttcttttttgtcttgaatgaattttaaaaggaaatatataataaaaatgttaaccagaaggtaaacttgagtgtaattgtcagacagacacacttttccaccagtgtatttgaattttagaccagtgaccctgttttgtggcattcatgcaaaacatgctgagggctttgttcatctggtcatcgtgtccaaatttcagtcatgtttgtagcaagattttggaagcattcatatttcctttttaaaatgtattcctttgtgttcaacagttaatcaaaaccagagagtctagggcagcctctctgatgttgtcaatgatgtaaattcagtccctggtttttaattttctgtctgatgtcacagatcattgttgcacacaaacgtggcatagaaaagaacatgttcagaagccatggggccaagcacatgcggggacggtctcaaatgcgtgatcagagaatccttcacctttgctgaaaagtgagctcagatccagcaccatgttcctcctgacccatcctgtctatcttctcagttgagtttttaatctcactttgggtttccttgtgaagttggagggaagtttataatagcctaacactaccccacccccaactaggaggaacctctgttttcaagagagatgcctgtcctgtgcttggatagtcagtcaattatttgtgtatgaaacaatgtacaaatcaatgttttgaaaataatgatctcagactttctaagttaaattttaaaaattttgattgtttgccatattgggtgggtttactcttagaatcgcatgctgtagaaatgctcaaaagtgcatatgggactcagtccttaggtgttctttttcttttaagaaataacctcttacagttgtaaccattgcggctctgtccacttctcgttgctgctctgtggcacatatcggaagcagtacagcgcgcggctctacacgcttgggtagcgggataagtcactgttttctttatttctttaaaaaaaaaaaagttctgttgcaaacgactgctgttggattctgagggtggggagggagagagagggagggagagggagtgaagagcctgccctcctatatggattcttcagggccctccacatctgaggtggctcattcccatcacacacagattgtcctggtgttcatttcaaggccagtgttcagcagcagcgtttggaaagcaggttctgtgggaccccccgccccgccccccgcactccttcatagcagcagtagtggcttctccatcctgttttctgcaacattctatacaaaactgtgctgtgaccttgcggtaggcctggatctggcaaagagaatacaaatgaaaccccttctttctctttccgtccaacaactctgtagagctctctgcacccttacccctttccaccttttgtatttaattttaaagtcagtgtactgcaaggaagctggatgcaagatagatactatattaaactgtactgttatttaagatgtaataaagcagtttgacatgaaaaaaaaaaaaaaaaaaaa

SEQ ID NO: 248 - DNA, 2031 bp, Homo sapiens
  gene (1)..(2031): Accession No. NM_145899
catttgcatggccccgccccctgagtgacacggctggcgcgggcgggcccgtcccccctgcccctgggtcgctctttttaagctcccctgagccggtgctgcgctcctctaattgggactccgagccggggctatttctggcgctggcgcggctccaagaaggcatccgcatttgctaccagcggcggccgcggcggagccaggccggtcctcagcgcccagcaccgccgctcccggcaacccggagcgcgcaccgcaggccggcggccgagctcgcgcatcccagccatcactcttccacctgctccttagagaagggaagatgagtgagtcgagctcgaagtccagccagcccttggcctccaagcaggaaaaggacggcactgagaagcggggccggggcaggccgcgcaagcagcctccggtgagtcccgggacagcgctggtagggagtcagaaggagcccagcgaagtgccaacacctaagagacctcggggccgaccaaagggaagcaaaaacaagggtgctgccaagacccggaaaaccaccacaactccaggaaggaaaccaaggggcagacccaaaaaactggagaaggaggaagaggagggcatctcgcaggagtcctcggaggaggagcagtgacccatgcgtgccgcctgctcctcactggaggagcagcttccttctgggactggacagctttgctccgctcccaccgcccccaccccttccccaggcccaccatcaccaccgcctctggccgccacccccatcttccacctgtgccctcaccaccacactacacagcacaccagccgctgcagggctcccatgggctgagtggggagcagttttcccctggcctcagttcccagctccccccgcccacccacgcatacacacatgccctcctggacaaggctaacatcccacttagccgcaccctgcacctgctgcgtccccactcccttggtggtggggacattgctctctgggcttttggtttgggggcgccctctctgctccttcactgttccctctggcttcccatagtggggcctgggagggttcccctggccttaaaaggggcccaagccccatctcatcctggcacgccctactccactgccctggcagcagcaggtgtggccaatggaggggggtgctggcccccaggattcccccagccaaactgtctttgtcaccacgtggggctcacttttcatccttccccaacttccctagtccccgtactaggttggacagcccccttcggttacaggaaggcaggaggggtgagtcccctactccctcttcactgtggccacagcccccttgccctccgcctgggatctgagtacatattgtggtgatggagatgcagtcacttattgtccaggtgaggcccaagagccctgtggccgccacctgaggtgggctggggctgctcccctaaccctactttgcttccgccactcagccatttccccctcctcagatggggcaccaataacaaggagctcaccctgcccgctcccaacccccctcctgctcctccctgccccccaaggttctggttccatttttcctctgttcacaaactacctctggacagttgtgttgttttttgttcaatgttccattcttcgacatccgtcattgctgctgctaccagcgccaaatgttcatcctcattgcctcctgttctgcccacgatcccctcccccaagatactctttgtggggaagaggggctggggcatggcaggctgggtgaccgactaccccagtcccagggaaggtggggccctgcccctaggatgctgcagcagagtgagcaagggggcccaaatcgaccataaagggtgtaggggccacctcctccccctgttctgttggggaggggtagccatgatttgtcccagcctggggctccctctctggtttcctatttgcagttacttgaataaaaaaaatatccttttctggaaaaaaaaaaaaaaaaaaaaaaaaaaaaaaaaaaaaaaa

SEQ ID NO: 249 - DNA, 2648 bp, Homo sapiens
  gene (1)..(2648): Accession No. NM_018951
taatcgtattcagcatgttttgcacaagaaatgtcagccagaaagggctatctgctcccttcgccaaattatcccacaacaatgtcatgctcggagagccccgccgcgaactcttttttggtcgactcgctcatcagctcgggcagaggcgaggcaggcggcggtggtggtggcgcggggggcggcggcggtggcggttactacgcccacggcggggtctacctgccgcccgccgccgacctgccctacgggctgcagagctgcgggctcttccccacgctgggcggcaagcgcaatgaggcagcgtcgccgggcagcggtggcggtggcgggggtctaggtcccggggcgcacggctacgggccctcgcccatagacctgtggctagacgcgccccggtcttgccggatggagccgcctgacgggccgccgccgccgccccagcagcagccgccgcccccgccgcaaccaccccagccagcgccgcaggccacctcgtgctctttcgcgcagaacatcaaagaagagagctcctactgcctctacgactcggcggacaaatgccccaaagtctcggccaccgccgccgaactggctcccttcccgcggggcccgccgcccgacggctgcgccctgggcacctccagcggggtgccagtgcctggctacttccgcctttctcaggcctacggcaccgccaagggctatggcagcggcggcggcggcgcgcagcaactcggggctggcccgttccccgcgcagcccccggggcgcggtttcgatctcccgcccgcgctagcctccggctcggccgatgcggcccggaaggagcgagccctcgattcgccgccgccccccacgctggcttgcggcagcggcgggggctcgcagggcgacgaggaggcgcacgcgtcgtcctcggccgcggaggagctctccccggccccttccgagagcagcaaagcctcgccggagaaggattccctgggcaattccaaaggtgaaaacgcagccaactggctcacggcaaagagtggtcggaagaagcgctgcccctacacgaagcaccagacactggagctggagaaggagtttctgttcaatatgtaccttactcgagagcggcgcctagagattagccgcagcgtccacctcacggacagacaagtgaaaatctggtttcagaaccgcaggatgaaactgaagaaaatgaatcgagaaaaccggatccgggagctcacagccaactttaatttttcctgatgaatctccaggcgacgcggttttttcacttcccgagcgctggtcccctccctctgtcttcaggctctgcccaggaactcgcacctgtgctggagccctgttcctccctcccacactcgccatctcctgggccgttacatctgtgcagggctggtttgttctgactttttgtttctttgtgtttgcttggtgctggtttatttgttgttttctgggggaaaaagccatatcatgctaaaattctatagagatagatattgtcctaagtgtcaagtcctgactgggctgggtttgctgtcttggggtcccactgctcgaaatggcccctgtcttcggccgagctggtttcctgcccagcctggggcaaacctagccggaaggccgaggtcccattgttggcgctgaggtgtctggcctgaggtcaatggtgcaaaggagccgccaccgggcatgtctgcctggagtgctgtgctgtgtttaatcaggggatacaggcccctgggtttcttttttctttcttcctttcttccttggccaagagaagggcttacaggcatggacatgcaggttggcaaacgggcttgactttggctgatttaaaaagtgagaaagaaagtaaaaaaggttaatttttccttcctctgtaagatatcccagctttaaaaagaaaaaaaaagaattaccaagagaaggggacttctcttccagtttctgtaaggtcttacattgcctgactaaaatgtttcatttacctctaaatttccatatccttctggctgtagataaataatgtagttttgtttatgcatttggaattagtggatttttttgtcattaaaattgttaccactggtaacatgtgacaagcacaccacaattctccctatcttgtgaagttgtttttttaaatcgccttgaacaaaaagttttttttttgtttgtttttgctttctgaaattcacagaagcctaggaggactggggtaagcggaataaactagagaagggagacattgtttggatttcctttatactgtgaagttacatgcataaaagggtcaaacctgtagatgcagaaaaagaaaaaaactataaatacaaatctgtataaatgtctattattatgaagaattgccaatcttgttttaagcaaatgcattctatcgttattataaatgttagttctagctctatttacttctaatcttaaatcagaataaattaatattgtattgctgctgtgcgtggaaaaagacgatgtttatgttcttatagaataaaagctgtggaatgaagctttttaattttaaaaaaaaaaaaaaaaaaaaaaaaaaaaaaaaaaaaaaaaaaaaaaaaaaaaaaaaaaaaaaaaaaaaaaaaaaaaaa

SEQ ID NO: 250 - DNA, 3676 bp, Homo sapiens
  gene (1)..(3676): Accession No. NM_006548
gagagacgagggcagcggaggaggcgaggagcgccgggtaccgggccgggggagccgcgggctctcggggaagagacggatgatgaacaagctttacatcgggaacctgagccccgccgtcaccgccgacgacctccggcagctctttggggacaggaagctgcccctggcgggacaggtcctgctgaagtccggctacgccttcgtggactaccccgaccagaactgggccatccgcgccatcgagaccctctcgggtaaagtggaattgcatgggaaaatcatggaagttgattactcagtctctaaaaagctaaggagcaggaaaattcagattcgaaacatccctcctcacctgcagtgggaggtgttggatggacttttggctcaatatgggacagtggagaatgtggaacaagtcaacacagacacagaaaccgccgttgtcaacgtcacatatgcaacaagagaagaagcaaaaatagccatggagaagctaagcgggcatcagtttgagaactactccttcaagatttcctacatcccggatgaagaggtgagctccccttcgccccctcagcgagcccagcgtggggaccactcttcccgggagcaaggccacgcccctgggggcacttctcaggccagacagattgatttcccgctgcggatcctggtccccacccagtttgttggtgccatcatcggaaaggagggcttgaccataaagaacatcactaagcagacccagtcccgggtagatatccatagaaaagagaactctggagctgcagagaagcctgtcaccatccatgccaccccagaggggacttctgaagcatgccgcatgattcttgaaatcatgcagaaagaggcagatgagaccaaactagccgaagagattcctctgaaaatcttggcacacaatggcttggttggaagactgattggaaaagaaggcagaaatttgaagaaaattgaacatgaaacagggaccaagataacaatctcatctttgcaggatttgagcatatacaacccggaaagaaccatcactgtgaagggcacagttgaggcctgtgccagtgctgagatagagattatgaagaagctgcgtgaggcctttgaaaatgatatgctggctgttaaccaacaagccaatctgatcccagggttgaacctcagcgcacttggcatcttttcaacaggactgtccgtgctatctccaccagcagggccccgcggagctccccccgctgccccctaccaccccttcactacccactccggatacttctccagcctgtacccccatcaccagtttggcccgttcccgcatcatcactcttatccagagcaggagattgtgaatctcttcatcccaacccaggctgtgggcgccatcatcgggaagaagggggcacacatcaaacagctggcgagattcgccggagcctctatcaagattgcccctgcggaaggcccagacgtcagcgaaaggatggtcatcatcaccgggccaccggaagcccagttcaaggcccagggacggatctttgggaaactgaaagaggaaaacttctttaaccccaaagaagaagtgaagctggaagcgcatatcagagtgccctcttccacagctggccgggtgattggcaaaggtggcaagaccgtgaacgaactgcagaacttaaccagtgcagaagtcatcgtgcctcgtgaccaaacgccagatgaaaatgaggaagtgatcgtcagaattatcgggcacttctttgctagccagactgcacagcgcaagatcagggaaattgtacaacaggtgaagcagcaggagcagaaataccctcagggagtcgcctcacagcgcagcaagtgaggctcccacaggcaccagcaaaacaacggatgaatgtagcccttccaacacctgacagaatgagaccaaacgcagccagccagatcgggagcaaaccaaagaccatctgaggaatgagaagtctgcggaggcggccagggactctgccgaggccctgagaaccccaggggccgaggaggggcggggaaggtcagccaggtttgccagaaccaccgagccccgcctcccgccccccagggcttctgcaggcttcagccatccacttcaccatccactcggatctctcctgaactcccacgacgctatcccttttagttgaactaacataggtgaacgtgttcaaagccaagcaaaatgcacaccctttttctgtggcaaatcgtctctgtacatgtgtgtacatattagaaagggaagatgttaagatatgtggcctgtgggttacacagggtgcctgcagcggtaatatattttagaaataatatatcaaataactcaactaactccaatttttaatcaattattaatttttttttctttttaaagagaaagcaggcttttctagactttaaagaataaagtctttgggaggtctcacggtgtagagaggagctttgaggccacccgcacaaaattcacccagagggaaatctcgtcggaaggacactcacggcagttctggatcacctgtgtatgtcaacagaagggataccgtctccttgaagaggaaactctgtcactcctcatgcctgtctagctcatacacccatttctctttgcttcacaggttttaaactggttttttgcatactgctatataattctctgtctctctctgtttatctctcccctccctcccctccccttcttctccatctccattcttttgaatttcctcatccctccatctcaatcccgtatctacgcacccccccccccccaggcaaagcagtgctctgagtatcacatcacacaaaaggaacaaaagcgaaacacacaaaccagcctcaacttacacttggttactcaaaagaacaagagtcaatggtacttgtcctagcgttttggaagaggaaaacaggaacccaccaaaccaaccaatcaaccaaacaaagaaaaaattccacaatgaaagaatgtattttgtctttttgcattttggtgtataagccatcaatattcagcaaaatgattcctttctttaaaaaaaaaaaatgtggaggaaagtagaaatttaccaaggttgttggcccagggcgttaaattcacagatttttttaacgagaaaaacacacagaagaagctacctcaggtgtttttacctcagcaccttgctcttgtgtttcccttagagattttgtaaagctgatagttggagcatttttttatttttttaataaaaatgagttggaaaaaaaataagatatcaactgccagcctggagaaggtgacagtccaagtgtgcaacagctgttctgaattgtcttccgctagccaagaacctatatggccttcttttggacaaaccttgaaaatgtttatttaaaaaaaaaaaagatgacaaagaaaaacagagagagagaatattggagatgtcctgaattttaatagggtacgcgccattagggctttttgcgctaaaggatgaacatgtactggtttatgtggacaagccattataccaccagactgcaatgccagtttcctctactgcaaacagtgttctgtgacaaaaaaaaaaaaaaaaaaaagaaaaaaaaagaaaaaacagaaatatatccagctaacaagaaaaaa

SEQ ID NO: 251 - DNA, 3263 bp, Homo sapiens
  gene (1)..(3263): Accession No. NM_014002
gagagagctgagagccaggactcagtgctgagcttggtgtcccaccgccacaaggaggcagggaagaaacccactagtcccagctcctggggtggcacagacattgcaactggccctgcctgtgggtcctaggggcccttggctaccaggaggctaagaacactgctcatgaatgacagtgagccctgaaagctctgggggtgtcacccagtcccacaagcctgcatcccctgcagtggagatgggctcagctcctggacgtgccacagacagaaagcataacatacactcgccaggaagagcctttgcctgactcagggcagctcagagtgtggggcagaaggtgaccagccagctcagggcaggagatgcagagcacagccaattacctgtggcacacagatgacctgctggggcagggggccactgccagtgtgtacaaggcccgcaacaagaaatccggagagctggttgctgtgaaggtcttcaacactaccagctacctgcggccccgcgaggtgcaggtgagggagtttgaggtcctgcggaagctgaaccaccagaacatcgtcaagctctttgcggtggaggagacgggcggaagccggcagaaggtactggtgatggagtactgctccagtgggagcctgctgagtgtgctggagagccctgagaatgcctttgggctgcctgaggatgagttcctggtggtgctgcgctgtgtggtggccggcatgaaccacctgcgggagaacggcattgtgcatcgcgacatcaagccggggaacatcatgcgcctcgtaggggaggaggggcagagcatctacaagctgacagacttcggcgctgcccgggagctggatgatgatgagaagttcgtctcggtctatgggactgaggagtacctgcatcccgacatgtatgagcgggcggtgcttcgaaagccccagcaaaaagcgttcggggtgactgtggatctctggagcattggagtgaccttgtaccatgcagccactggcagcctgcccttcatcccctttggtgggccacggcggaacaaggagatcatgtaccggatcaccacggagaagccggctggggccattgcaggtgcccagaggcgggagaacgggcccctggagtggagctacaccctccccatcacctgccagctgtcactggggctgcagagccagctggtgcccatcctggccaacatcctggaggtggagcaggccaagtgctggggcttcgaccagttctttgcggagaccagtgacatcctgcagcgagttgtcgtccatgtcttctccctgtcccaggcagtcctgcaccacatctatatccatgcccacaacacgatagccattttccaggaggccgtgcacaagcagaccagtgtggccccccgacaccaggagtacctctttgagggtcacctctgtgtcctcgagcccagcgtctcagcacagcacatcgcccacacgacggcaagcagccccctgaccctcttcagcacagccatccctaaggggctggccttcagggaccctgctctggacgtccccaagttcgtccccaaagtggacctgcaggcggattacaacactgccaagggcgtgttgggcgccggctaccaggccctgcggctggcacgggccctgctggatgggcaggagctaatgtttcgggggctgcactgggtcatggaggtgctccaggccacatgcagacggactctggaagtggcaaggacatccctcctctacctcagcagcagcctgggaactgagaggttcagcagcgtggctggaacgcctgagatccaggaactgaaggcggctgcagaactgaggtccaggctgcggactctagcggaggtcctctccagatgctcccaaaatatcacggagacccaggagagcctgagcagcctgaaccgggagctggtgaagagccgggatcaggtacatgaggacagaagcatccagcagattcagtgctgtttggacaagatgaacttcatctacaaacagttcaagaagtctaggatgaggccagggcttggctacaacgaggagcagattcacaagctggataaggtgaatttcagtcatttagccaaaagactcctgcaggtgttccaggaggagtgcgtgcagaagtatcaagcgtccttagtcacacacggcaagaggatgagggtggtgcacgagaccaggaaccacctgcgcctggttggctgttctgtggctgcctgtaacacagaagcccagggggtccaggagagtctcagcaagctcctggaagagctatctcaccagctccttcaggaccgagcaaagggggctcaggcctcgccgcctcccatagctccttaccccagccctacacgaaaggacctgcttctccacatgcaagagctctgcgaggggatgaagctgctggcatctgacctcctggacaacaaccgcatcatcgaacggctaaatagagtcccagcacctcctgatgtctgagctccatggggcacatgaggcatcctgaagcattagaatgattccaacactgctcttctgcaccatgagaccaacccagggcaagatcccatcccatcacatcagcctacctccctcctggctgctggccaggatgtcgccagcattaccttccactgcctttctccctgggaagcagcacagctgagactgggcaccaggccacctctgttgggacccacaggaaagagtgtggcagcaactgcctggctgacctttctatcttctctaggctcaggtactgctcctccatgcccatggctgggccgtggggagaagaagctctcatacgccttcccactccctctggtttataggacttcactccctagccaacaggagaggaggcctcctggggtttccccagggcagtaggtcaaacgacctcatcacagtcttccttcctcttcaagcgtttcatgttgaacacagctctctccgctcccttgtgatttctgagggtcaccactgccagcctcaggcaacatagagagcctcctgttctttctatgcttggtctgactgagcctaaagttgagaaaatgggtggccaaggccagtgccagtgtcttggggcccctttggctctccctcactctctgaggctccagctggtcctgggacatgcagccaggactgtgagtctgggcaggtccaaggcctgcaccttcaagaagtggaataaatgtggcctttgcttctgtt

SEQ ID NO: 252 - DNA, 1135 bp, Homo sapiens
  gene (1)..(1135): Accession No. NM_001564
cgtgccctctcgagcggctgcggggtccccgcggcgccgggctgctgagctgagggcccgcggcggccgcggccggtgcatgtgcggctgctggatgcggaggcggcggcgacggcgcggatcggcaggatgttagggcagcagcagcagcaactgtactcgtcggccgcgctcctgaccggggagcggagccggctgctcacctgctacgtgcaggactaccttgagtgcgtggagtcgctgccccacgacatgcagaggaacgtgtctgtgctgcgagagctggacaacaaatatcaagaaacgttaaaggaaattgatgatgtctacgaaaaatataagaaagaagatgatttaaaccagaagaaacgtctacagcagcttctccagagagcactaattaatagtcaagaattgggagatgaaaaaatacagattgttacacaaatgctcgaattggtggaaaatcgggcaagacaaatggagttacactcacagtgtttccaagatcctgctgaaagtgaacgagcctcagataaagcaaagatggattccagccaaccagaaagatcttcaagaagaccccgcaggcagcggaccagtgaaagccgtgatttatgtcacatggcaaatgggattgaagactgtgatgatcagccacctaaagaaaagaaatccaagtcagcaaagaaaaagaaacgctccaaggccaagcaggaaagggaagcttcacctgttgagtttgcaatagatcctaatgaacctacatactgcttatgcaaccaagtgtcttatggggagatgataggatgtgacaatgaacagtgtccaattgaatggtttcacttttcatgtgtttcacttacctataaaccaaaggggaaatggtattgcccaaagtgcaggggagataatgagaaaacaatggacaaaagtactgaaaagacaaaaaaggatagaagatcgaggtagtaaaggccatccacattttaaagggttatttgtcttttatataattcgtttgctttcagaaaatgttttagggtaaatgcataagactatgcaataatttttaatcattagtattaatggtgtattaaaagttgttgtactttgaaaaaaaaaaaaaaaaaaa

SEQ ID NO: 253 - DNA, 7219 bp, Homo sapiens
  gene (1)..(7219): Accession No. NM_003870
ggaccccggcaagcccgcgcacttggcaggagctgtagctaccgccgtccgcgcctccaaggtttcacggcttcctcagcagagactcgggctcgtccgccatgtccgccgcagacgaggttgacgggctgggcgtggcccggccgcactatggctctgtcctggataatgaaagacttactgcagaggagatggatgaaaggagacgtcagaacgtggcttatgagtacctttgtcatttggaagaagcgaagaggtggatggaagcatgcctaggggaagatctgcctcccaccacagaactggaggaggggcttaggaatggggtctaccttgccaaactggggaacttcttctctcccaaagtagtgtccctgaaaaaaatctatgatcgagaacagaccagatacaaggcgactggcctccactttagacacactgataatgtgattcagtggttgaatgccatggatgagattggattgcctaagattttttacccagaaactacagatatctatgatcgaaagaacatgccaagatgtatctactgtatccatgcactcagtttgtacctgttcaagctaggcctggcccctcagattcaagacctatatggaaaggttgacttcacagaagaagaaatcaacaacatgaagactgagttggagaagtatggcatccagatgcctgcctttagcaagattgggggcatcttggctaatgaactgtcagtggatgaagccgcattacatgctgctgttattgctattaatgaagctattgaccgtagaattccagccgacacatttgcagctttgaaaaatccgaatgccatgcttgtaaatcttgaagagcccttggcatccacttaccaggatatactttaccaggctaagcaggacaaaatgacaaatgctaaaaacaggacagaaaactcagagagagaaagagatgtttatgaggagctgctcacgcaagctgaaattcaaggcaatataaacaaagtcaatacattttctgcattagcaaatatcgacctggctttagaacaaggagatgcactggccttgttcagggctctgcagtcaccagccctggggcttcgaggactgcagcaacagaatagcgactggtacttgaagcagctcctgagtgataaacagcagaagagacagagtggtcagactgaccccctgcagaaggaggagctgcagtctggagtggatgctgcaaacagtgctgcccagcaatatcagagaagattggcagcagtagcactgattaatgctgcaatccagaagggtgttgctgagaagactgttttggaactgatgaatcccgaagcccagctgccccaggtgtatccatttgccgccgatctctatcagaaggagctggctaccctgcagcgacaaagtcctgaacataatctcacccacccagagctctctgtcgcagtggagatgttgtcatcggtggccctgatcaacagggcattggaatcaggagatgtgaatacagtgtggaagcaattgagcagttcagttactggtcttaccaatattgaggaagaaaactgtcagaggtatctcgatgagttgatgaaactgaaggctcaggcacatgcagagaataatgaattcattacatggaatgatatccaagcttgcgtggaccatgtgaacctggtggtgcaagaggaacatgagaggattttagccattggtttaattaatgaagccctggatgaaggtgatgcccaaaagactctgcaggccctacagattcctgcagctaaacttgagggagtccttgcagaagtggcccagcattaccaagacacgctgattagagcgaagagagagaaagcccaggaaatccaggatgagtcagctgtgttatggttggatgaaattcaaggtggaatctggcagtccaacaaagacacccaagaagcacagaagtttgccttaggaatctttgccattaatgaggcagtagaaagtggtgatgttggcaaaacactgagtgcccttcgctcccctgatgttggcttgtatggagtcatccctgagtgtggtgaaacttaccacagtgatcttgctgaagccaagaagaaaaaactggcagtaggagataataacagcaagtgggtgaagcactgggtaaaaggtggatattattattaccacaatctggagacccaggaaggaggatgggatgaacctccaaattttgtgcaaaattctatgcagctttctcgggaggagatccagagttctatctctggggtgactgccgcatataaccgagaacagctgtggctggccaatgaaggcctgatcaccaggctgcaggctcgctgccgtggatacttagttcgacaggaattccgatccaggatgaatttcctgaagaaacaaatccctgccatcacctgcattcagtcacagtggagaggatacaagcagaagaaggcatatcaagatcggttagcttacctgcgctcccacaaagatgaagttgtaaagattcagtccctggcaaggatgcaccaagctcgaaagcgctatcgagatcgcctgcagtacttccgggaccatataaatgacattatcaaaatccaggcttttattcgggcaaacaaagctcgggatgactacaagactctcatcaatgctgaggatcctcctatggttgtggtccgaaaatttgtccacctgctggaccaaagtgaccaggattttcaggaggagcttgaccttatgaagatgcgggaagaggttatcaccctcattcgttctaaccagcagctggagaatgacctcaatctcatggatatcaaaattggactgctagtgaaaaataagattacgttgcaggatgtggtttcccacagtaaaaaacttaccaaaaaaaataaggaacagttgtctgatatgatgatgataaataaacagaagggaggtctcaaggctttgagcaaggagaagagagagaagttggaagcttaccagcacctgttttatttattgcaaaccaatcccacctatctggccaagctcatttttcagatgccccagaacaagtccaccaagttcatggactctgtaatcttcacactctacaactacgcgtccaaccagcgagaggagtacctgctcctgcggctctttaagacagcactccaagaggaaatcaagtcgaaggtagatcagattcaagagattgtgacaggaaatcctacggttattaaaatggttgtaagtttcaaccgtggtgcccgtggccagaatgccctgagacagatcttggccccagtcgtgaaggaaattatggatgacaaatctctcaacatcaaaactgaccctgtggatatttacaaatcttgggttaatcagatggagtctcagacaggagaggcaagcaaactgccctatgatgtgacccctgagcaggcgctagctcatgaagaagtgaagacacggctagacagctccatcaggaacatgcgggctgtgacagacaagtttctctcagccattgtcagctctgtggacaaaatcccttatgggatgcgcttcattgccaaagtgctgaaggactcgttgcatgagaagttccctgatgctggtgaggatgagctgctgaagattattggtaacttgctttattatcgatacatgaatccagccattgttgctcctgatgcctttgacatcattgacctgtcagcaggaggccagcttaccacagaccaacgccgaaatctgggctccattgcaaaaatgcttcagcatgctgcttccaataagatgtttctgggagataatgcccacttaagcatcattaatgaatatctttcccagtcctaccagaaattcagacggtttttccaaactgcttgtgatgtcccagagcttcaggataaatttaatgtggatgagtactctgatttagtaaccctcaccaaaccagtaatctacatttccattggtgaaatcatcaacacccacactctcctgttggatcaccaggatgccattgctccggagcacaatgatccaatccacgaactgctggacgacctcggcgaggtgcccaccatcgagtccctgataggggaaagctctggcaatttaaatgacccaaataaggaggcactggctaagacggaagtgtctctcaccctgaccaacaagttcgacgtgcctggagatgagaatgcagaaatggatgctcgaaccatcttactgaatacaaaacgtttaattgtggatgtcatccggttccagccaggagagaccttgactgaaatcctagaaacaccagccaccagtgaacaggaagcagaacatcagagagccatgcagagacgtgctatccgtgatgccaaaacacctgacaagatgaaaaagtcaaaatctgtaaaggaagacagcaacctcactcttcaagagaagaaagagaagatccagacaggtttaaagaagctaacagagcttggaaccgtggacccaaagaacaaataccaggaactgatcaacgacattgccagggatattcggaatcagcggaggtaccgacagaggagaaaggccgaactagtgaaactgcaacagacatacgctgctctgaactctaaggccaccttttatggggagcaggtggattactataaaagctatatcaaaacctgcttggataacttagccagcaagggcaaagtctccaaaaagcctagggaaatgaaaggaaagaaaagcaaaaagatttctctgaaatatacagcagcaagactacatgaaaaaggagttcttctggaaattgaggacctgcaagtgaatcagtttaaaaatgttatatttgaaatcagtccaacagaagaagttggagacttcgaagtgaaagccaaattcatgggagttcaaatggagacttttatgttacattatcaggacctgctgcagctacagtatgaaggagttgcagtcatgaaattatttgatagagctaaagtaaatgtcaacctcctgatcttccttctcaacaaaaagttctacgggaagtaattgatcgtttgctgccagcccagaaggatgaaggaaagaagcacctcacagctcctttctaggtccttctttcctcattggaagcaaagacctagccaacaacagcacctcaatctgatacactcccgatgccacatttttaactcctctcgctctgatgggacatttgttacccttttttcatagtgaaattgtgtttcaggcttagtctgacctttctggtttcttcattttcttccattacttaggaaagagtggaaactccactaaaatttctctgtgttgttacagtcttagaggttgcagtactatattgtaagctttggtgtttgtttaattagcaatagggatggtaggattcaaatgtgtgtcatttagaagtggaagctattagcaccaatgacataaatacatacaagacacacaactaaaatgtcatgttattaacagttattaggttgtcatttaaaaataaagttcctttatatttctgtcccatcaggaaaactgaaggatatggggaatcattggttatcttccattgtgtttttctttatggacaggagctaatggaagtgacagtcatgttcaaaggaagcatttctagaaaaaaggagataatgtttttaaatttcattatcaaacttgggcaattctgtttgtgtaactccccgactagtggatgggagagtcccattgctaaaattcagctactcagataaattcagaatgggtcaaggcacctgcctgtttttgttggtgcacagagattgacttgattcagagagacaattcactccatccctatggcagaggaatgggttagccctaatgtagaatgtcattgtttttaaaactgttttatatcttaagagtgccttattaaagtatagatgtatgtcttaaaatgtgggtgataggaattttaaagatttatataatgcatcaaaagccttagaataagaaaagctttttttaaattgctttatctgtatatctgaactcttgaaacttatagctaaaacactaggatttatctgcagtgttcagggagataattctgcctttaattgtctaaaacaaaaacaaaaccagccaacctatgttacacgtgagattaaaaccaattttttccccattttttctccttttttctcttgctgcccacattgtgcctttattttatgagccccagttttctgggcttagtttaaaaaaaaaatcaagtctaaacattgcatttagaaagcttttgttcttggataaaaagtcatacactttaaaaaaaaaaaaaactttttccaggaaaatatattgaaatcatgctgctgagcctctattttctttctttgatgttttgattcagtattcttttatcataaatttttagcatttaaaaattcactgatgtacattaagccaataaactgctttaatgaataacaaactatgtagtgtgtccctattataaatgcattggagaagtatttttatgagactctttactcaggtgcatggttacagcccacagggaggcatggagtgccatggaaggattcgccactacccagaccttgttttttgttgtattttggaagacaggttttttaaagaaacattttcctcagattaaaagatgatgctattacaactagcattgcctcaaaaactgggaccaaccaaagtgtgtcaaccctgtttccttaaaagaggctatgaatcccaaaggccacatccaagacaggcaataatgagcagagtttacagctcctttaataaaatgtgtcagtaattttaaggtttatagttccctcaacacaattgctaatgcagaatagtgtaaaatgcgcttcaagaatgttgatgatgatgatatagaattgtggctttagtagcacagaggatgccccaacaaactcatggcgttgaaaccacacagttctcattactgttatttattagctgtagcattctctgtctcctctctctcctcctttgaccttctcctcgaccagccatcatgacatttaccatgaatttacttcctcccaagagtttggactgcccgtcagattgttgctgcacatagttgcctttgtatctctgtatgaaataaaaggtcatttgttcatgttaaaaaaaaa

SEQ ID NO: 254 - DNA, 5226 bp, Homo sapiens
  gene (1)..(5226): Accession No. NM_002209
acacctccctccccgcctgccagtgtcaccagcctgttgcctctgtgagaaagtaccactgtaagaggccaaagggcatgatcattttcctctttcaccctgtctaggttgccagcaaatcccacgggcctcctgacgctgcccctggggccacaggtccctcgagtgctggaaggatgaaggattcctgcatcactgtgatggccatggcgctgctgtctgggttctttttcttcgcgccggcctcgagctacaacctggacgtgcggggcgcgcggagcttctccccaccgcgcgccgggaggcactttggataccgcgtcctgcaggtcggaaacggggtcatcgtgggagctccaggggaggggaacagcacaggaagcctctatcagtgccagtcgggcacaggacactgcctgccagtcaccctgagaggttccaactatacctccaagtacttgggaatgaccttggcaacagaccccacagatggaagcattttggcctgtgaccctgggctgtctcgaacgtgtgaccagaacacctatctgagtggcctgtgttacctcttccgccagaatctgcagggtcccatgctgcaggggcgccctggttttcaggaatgtatcaagggcaacgtagacctggtatttctgtttgatggttcgatgagcttgcagccagatgaatttcagaaaattctggacttcatgaaggatgtgatgaagaaactcagcaacacttcgtaccagtttgctgctgttcagttttccacaagctacaaaacagaatttgatttctcagattatgttaaacggaaggaccctgatgctctgctgaagcatgtaaagcacatgttgctgttgaccaatacctttggtgccatcaattatgtcgcgacagaggtgttccgggaggagctgggggcccggccagatgccaccaaagtgcttatcatcatcacggatggggaggccactgacagtggcaacatcgatgcggccaaagacatcatccgctacatcatcgggattggaaagcattttcagaccaaggagagtcaggagaccctccacaaatttgcatcaaaacccgcgagcgagtttgtgaaaattctggacacatttgagaagctgaaagatctattcactgagctgcagaagaagatctatgtcattgagggcacaagcaaacaggacctgacttccttcaacatggagctgtcctccagcggcatcagtgctgacctcagcaggggccatgcagtcgtgggggcagtaggagccaaggactgggctgggggctttcttgacctgaaggcagacctgcaggatgacacatttattgggaatgaaccattgacaccagaagtgagagcaggctatttgggttacaccgtgacctggctgccctcccggcaaaagacttcgttgctggcctcgggagcccctcgataccagcacatgggccgagtgctgctgttccaagagccacagggcggaggacactggagccaggtccagacaatccatgggacccagattggctcttatttcggtggggagctgtgtggcgtcgacgtggaccaagatggggagacagagctgctgctgattggtgccccactgttctatggggagcagagaggaggccgggtgtttatctaccagagaagacagttggggtttgaagaagtctcagagctgcagggggaccccggctacccactcgggcggtttggagaagccatcactgctctgacagacatcaacggcgatgggctggtagacgtggctgtgggggcccctctggaggagcagggggctgtgtacatcttcaatgggaggcacggggggcttagtccccagccaagtcagcggatagaagggacccaagtgctctcaggaattcagtggtttggacgctccatccatggggtgaaggaccttgaaggggatggcttggcagatgtggctgtgggggctgagagccagatgatcgtgctgagctcccggcccgtggtggatatggtcaccctgatgtccttctctccagctgagatcccagtgcatgaagtggagtgctcctattcaaccagtaacaagatgaaagaaggagttaatatcacaatctgtttccagatcaagtctctcatcccccagttccaaggccgcctggttgccaatctcacttacactctgcagctggatggccaccggaccagaagacgggggttgttcccaggagggagacatgaactcagaaggaatatagctgtcaccaccagcatgtcatgcactgacttctcatttcatttcccggtatgtgttcaagacctcatctcccccatcaatgtttccctgaatttctctctttgggaggaggaagggacaccgagggaccaaagggcgcagggcaaggacataccgcccatcctgagaccctccctgcactcggaaacctgggagatcccttttgagaagaactgtggggaggacaagaagtgtgaggcaaacttgagagtgtccttctctcctgcaagatccagagccctgcgtctaactgcttttgccagcctctctgtggagctgagcctgagtaacttggaagaagatgcttactgggtccagctggacctgcacttccccccgggactctccttccgcaaggtggagatgctgaagccccatagccagatacctgtgagctgcgaggagcttcctgaagagtccaggcttctgtccagggcattatcttgcaatgtgagctctcccatcttcaaagcaggccactcggttgctctgcagatgatgtttaatacactggtaaacagctcctggggggactcggttgaattgcacgccaatgtgacctgtaacaatgaggactcagacctcctggaggacaactcagccactaccatcatccccatcctgtaccccatcaacatcctcatccaggaccaagaagactccacactctatgtcagtttcacccccaaaggccccaagatccaccaagtcaagcacatgtaccaggtgaggatccagccttccatccacgaccacaacatacccaccctggaggctgtggttggggtgccacagcctcccagcgaggggcccatcacacaccagtggagcgtgcagatggagcctcccgtgccctgccactatgaggatctggagaggctcccggatgcagctgagccttgtctccccggagccctgttccgctgccctgttgtcttcaggcaggagatcctcgtccaagtgatcgggactctggagctggtgggagagatcgaggcctcttccatgttcagcctctgcagctccctctccatctccttcaacagcagcaagcatttccacctctatggcagcaacgcctccctggcccaggttgtcatgaaggttgacgtggtgtatgagaagcagatgctctacctctacgtgctgagcggcatcggggggctgctgctgctgctgctcattttcatagtgctgtacaaggttggtttcttcaaacggaacctgaaggagaagatggaggctggcagaggtgtcccgaatggaatccctgcagaagactctgagcagctggcatctgggcaagaggctggggatcccggctgcctgaagcccctccatgagaaggactctgagagtggtggtggcaaggactgagtccaggcctgtgaggtgcagagtgcccagaactggactcaggatgcccagggccactctgcctctgcctgcattctgccgtgtgccctcgggcgagtcactgcctctccctggccctcagtttccctatctcgaacatggaactcattcctgcctgtctcctttgcaggctcatagggaagacctgctgagggaccagccaagagggctgcaaaagtgagggcttgtcattaccagacggttcaccagcctctcttggtttccttccttggaagagaatgtctgatctaaatgtggagaaactgtagtctcaggacctagggatgttctggccctcacccctgccctgggatgtccacagatgcctccaccccccagaacctgtccttgcacactcccctgcactggagtccagtctcttctgctggcagaaagcaaatgtgacctgtgtcactacgtgactgtggcacacgccttgttcttggccaaagaccaaattccttggcatgccttccagcaccctgcaaaatgagaccctcgtggccttccccagcctcttctagagccgtgatgcctccctgttgaagctctggtgacaccagcctttctcccaggccaggctccttcctgtcttcctgcattcacccagacagctccctctgcctgaaccttccatctcgccacccctccttccttgaccagcagatcccagctcacgtcacacttggttgggtcctcacatctttcacacttccaccagcctgcactactccctcaaagcacacgtcatgtttcttcatccggcagcctggatgttttttccctgtttaatgattgacgtacttagcagctatctctcagtgaactgtgagggtaaaggctatacttgtcttgttcaccttgggatgatgcctcatgatatgtcagggcgtgggacatctagtaggtgcttgacataatttcactgaattaatgacagagccagtgggaagatacagaaaaagaggggctgggctgggcgcggtggttcacgcctgtaatcccagcactttgggaggccaaggagggtggatcacctgaggtcaggagttagaggccagcctggcgaaaccccatctctactaaaaatacaaaatccaggcgtggtggcacacacctgtagtcccagctactcaggaggttgaggtaggagaattgcttgaacctgggaggtggaggttgcagtgagccaagattgcgccattgcactccagcctgggcaacacagcgagactccgtctcaaggaaaaaataaaaataaaaagcgggcacgggcccgtgacatccccacccttggaggctgtcttctcaggctctgccctgccctagctccacaccctctcccaggacccatcacgcctgtgcagtggcccccacagaaagactgagctcaaggtgggaaccacgtctgctaacttggagccccagtgccaagcacagtgcctgcatgtatttatccaataaatgtgaaattctgtccaaaaaaaaaaaaaaaaaa

SEQ ID NO: 255 - DNA, 4201 bp, Homo sapiens
  gene (1)..(4201): Accession No. NM_004737
gggggcgcggccgcgctcgtctcgccgggctgttcgcgggcaggccctgccctgaagggacgaatcggcttggagcgcgggaggtggagtcggccccggcggtcgctccctggacccaacccgaggctgacccaggcccctgcccatgcggggcgcccctggctcggaagagtcccccgggccgggagcagctccaggcagcggccccggaggaagaggaagaagggacagtgctcagcttgggggacccggaccctcgccgcggcatttggagccgggggcagtcccgaactctgtgcttggcaccgccgctccgagtagggcagcgcctgccgggaccctgacccggaccccctgcgcctcgtaggcggcggcgccgccgcgccaccctgttcttccgtgtctccctctgcctggcggcagtcacggccaagaacctacattaagaaacgcattcagatgcatcagccgtttgtaaagcacctgtcgtgagccagagagtattatgagggaggccgaggacttcatgctccggacagagaaacggcgctgggattagggattgccacttctgagaggatgctgggaatctgcagggggagacggaaattcttggctgcctcgttgagtcttctctgcatcccagccatcacctggatttacctgttttctgggagcttcgaagatggaaagcccgtgtctctgtcaccgctggagtcccaggcacacagccccaggtacacggcctccagccagcgggagcgcgagagcctggaggtgcgcatgcgcgaggtggaggaggagaaccgcgccctccgcaggcagctcagcctggcccagggccgagccccatcccatcgccgaggcaaccactccaagacctactccatggaggagggcactggagacagcgagaaccttcgggctggcatcgtggcaggcaacagctccgagtgtgggcagcagccggtcgtggagaaatgcgagacaatccacgttgctattgtctgcgccggatacaatgccagccgggatgtcgtcaccctggtcaaatccgtcctgttccatagacggaaccctctgcacttccaccttattgctgactccattgcggagcagatcctggccacgctcttccagacctggatggtgcccgctgtgcgtgtggacttctacaatgcagacgagctcaagtctgaagtttcctggatccccaataaacattactctgggatttatggtctgatgaagcttgtcctgaccaagactcttcctgccaacctggagagagtcatcgtccttgacacggatatcacctttgccactgacattgcagagctgtgggctgtgttccacaagttcaaaggtcagcaagtcctgggcttggtggagaaccagagtgactggtaccttggaaacctgtggaaaaatcaccgcccatggccagcccttggaagaggctacaacacaggggtgatcctgttacttctggataagctgcggaagatgaaatgggagcagatgtggaggctgaccgcagagagggagctcatgggcatgctctctacatccttagctgaccaggatattttcaatgccgtcatcaaacaaaaccccttccttgtgtaccagctcccctgcttctggaatgtgcagctgtcagaccacacccgctccgagcagtgctacagagacgtgtctgatctaaaggtcattcactggaactcccccaagaagctccgggtgaagaacaagcatgtggagttttttcgcaacctctacctgaccttcctggagtatgacggcaatcttctgaggcgggaactgtttggctgccccagtgaggctgatgtcaacagtgaaaacctccagaagcagctgtctgagctggacgaggacgacctgtgctatgagttccggcgagagcgcttcactgtccaccgcacccacctgtacttcctgcactacgagtatgagcctgcagcagacagcacggacgtcaccctggtcgctcagctgtccatggacaggctccagatgctggaggccatctgcaagcactgggaggggcccatcagcctggccctctacctgtcagacgccgaggcccagcagttcctccgctacgcacagggctctgaggtgcttatgagccgccacaacgtgggctaccacatcgtgtacaaggagggccagttctaccccgtgaacctgctgcgcaacgtggccatgaagcacatcagcactccctacatgttcctgtctgacattgacttcctgcccatgtatgggctctatgagtacctcaggaagtctgtcatccagctcgatcttgccaacaccaagaaagcaatgattgtccccgcgttcgagacactgcgctaccggctgtccttccccaagtcaaaagcggagttgctgtcaatgctggacatggggaccctcttcacattcaggtaccacgtctggacgaaaggccacgcacccacaaacttcgccaagtggcggaccgccaccacgccttaccgggttgagtgggaggccgattttgagccgtatgttgttgtgagacgtgactgcccggagtacgaccggaggtttgtaggctttggctggaacaaagtggctcatatcatggagctggatgtgcaggagtatgagttcattgtgctgcccaacgcctacatgatccacatgcctcatgcccccagcttcgacattaccaagttccgttccaacaagcaataccgcatctgtctcaaaaccctcaaggaagagtttcagcaggacatgtcccgccgctacggctttgctgccctgaaatatctcacagccgagaacaacagctagcaccaagaagcccaccactagggggagacatgctgtaggggaagtgccactcgctgtttggggcccggccttcaaattcaaaattgagccatgctttttcggtttgtttttatttatctctttggcccagccaagctgccctcactacagagaccttggacaaggatccagccagtccctctctgccccacaaccctgcattcccagaggttagctatgcagcccacctagatgagtctcttcaagaatgggaaatcaaggggtgacagggagtaaaagggttatcatcttactgcaaagccacaagatcagggcagggctttaggatgttctggatgctttttaataattatgcttcccatcataactggggagaaagggaagtcagggttctaggggttattcgtcccaggaaatagaagtgaaattgtctttattaagtgaaaactttcccctttgccctgcaatgtagctgggcattcaaacggagggcaaaccgatgatctaaaccaaccacttggaaaaacccaatggggacattgtaaccagagggtcctggaggtggggttgatgggtttccttatccccaaagtcactcctgttttgttttgtttttctttgggggttttgtttatttttggggctggcaatccaaaatagaaaatctgatcctttgaggctctaaaggaaaatcagctgcctctaccaaccaccctctatcagcagtggcccaggaaggaggtcaagcatcttcggccgatatttaaacatgggcagcttccttcaggatgatcaccgaggctcccgtgactttgaactccctactctccagaatccaggggctatagcgatggggactgcggaattacgagggctggctgttttacaccggtcacattttctattggcagtgactgattcatgggaaagggctttgaaggaactacttcagtgcacacacaaggtacgaacctctcaggcctttcgaagaactttcataattcatgaaagcccagttctgaagattcacgtatccatctggagacctacaggaagaaagtgattgggttcctctggttcttgcctgcttcactgtggatgggaagaggtgacaacctcagtctccctttgggacctgtccaagggtaggcaaccaccttcaccttcacacagattgaggagacactggactttttacccattttctttaatcttcaatattaatattgtgtttacattgatgagaacaagagttaatgccctaccctctgctgggctgtttgtattgagttgcaatgtgaccagcgaaagctgcatttaataaatgaaagtacagactgtttcttcccca

SEQ ID NO: 256 - DNA, 2996 bp, Homo sapiens
  gene (1)..(2996): Accession No. NM_006499
tggacttggatccgaggcagacgaggaagctgagaaaaccctggcgttgaccccgtggacctgggcgccccgggaaggccagcgcttggtccaggcaggcggggcctgtgcggtgaccaccctggtcctgaaaagtcccagccccgagcgccctccctcctagacctggaggcctggaacagccagccgcccacggacgccagagccgggaaccctgacggcacttagctgctgacaaacaacctgctccgtggagcgcctgaaacaccagtctttggggccagtgcctcagtttcaatccaggtaacctttaaatgaaacttgcctaaaatcttaggtcatacacagaagagactccaatcgacaagaagctggaaaagaatgatgttgtccttaaacaacctacagaatatcatctataacccggtaatcccgtttgttggcaccattcctgatcagctggatcctggaactttgattgtgatacgtgggcatgttcctagtgacgcagacagattccaggtggatctgcagaatggcagcagcatgaaacctcgagccgatgtggcctttcatttcaatcctcgtttcaaaagggccggctgcattgtttgcaatactttgataaatgaaaaatggggacgggaagagatcacctatgacacgcctttcaaaagagaaaagtcttttgagatcgtgattatggtgctgaaggacaaattccaggtggctgtaaatggaaaacatactctgctctatggccacaggatcggcccagagaaaatagacactctgggcatttatggcaaagtgaatattcactcaattggttttagcttcagctcggacttacaaagtacccaagcatctagtctggaactgacagagataagtagagaaaatgttccaaagtctggcacgccccagcttcctagtaatagaggaggagacatttctaaaatcgcacccagaactgtctacaccaagagcaaagattcgactgtcaatcacactttgacttgcaccaaaataccacctatgaactatgtgtcaaagaggctgccattcgctgcaaggttgaacacccccatgggccctggacgaactgtcgtcgttaaaggagaagtgaatgcaaatgccaaaagctttaatgttgacctactagcaggaaaatcaaaggatattgctctacacttgaacccacgcctgaatattaaagcatttgtaagaaattcttttcttcaggagtcctggggagaagaagagagaaatattacctctttcccatttagtcctgggatgtactttgagatgataatttattgtgatgttagagaattcaaggttgcagtaaatggcgtacacagcctggagtacaaacacagatttaaagagctcagcagtattgacacgctggaaattaatggagacatccacttactggaagtaaggagctggtagcctacctacacagctgctacaaaaaccaaaatacagaatggcttctgtgatactggccttgctgaaacgcatctcactgtcattctattgtttatattgttaaaatgagcttgtgcaccattaggtcctgctgggtgttctcagtccttgccatgaagtatggtggtgtctagcactgaatggggaaactgggggcagcaacacttatagccagttaaagccactctgccctctctcctactttggctgactcttcaagaatgccattcaacaagtatttatggagtacctactataatacagtagctaacatgtattgagcacagattttttttggtaaaactgtgaagagctaggatatatacttggtgaaacaaaccagtatgttccctgttctcttgagcttcgactcttctgtgcgctactgctgcgcactgctttttctacaggcattacatcaactcctaaggggtcctctgggattagttatgcagatattaaatcacccgaagacactaacttacagaagacacaactccttccccagtgatcactgtcataaccagtgctctaccgtatcccatcactgaggactgatgttgactgacatcattttctttatcgtaataaacatgtggctctattagctgcaagctttaccaagtaattggcatgacatctgagcacagaaattaaggcaaaaaaccaaagcaaaacaaatacatggtgctgaaattaacttgatgccaagcccaaggcagctgatttctgtgtatttgaacttagggcaaatcagagtctacacagacgcctacagaaagtttcaggaagaggcaagatgcattcaatttgaaagatatttatgggcaacaaagtaaggtcaggattagacttcaggcattcataaggcaggcactatcagaaagtgtacgccaactaagggacccacaaagcaggcagaggtaatgcagaaatctgttttgttcccatgaaatcaccaatcaaggcctccgttcttctaaagattagtccatcatcattagcaactgagatcaaagcactcttccactttacgtgattaaaatcaaacctgtatcagcaagttaaatggttccatttctgtgatttttctattatttgaggggagttggcagaagttccatgtatatgggatctttacaggtcagatcttgttacaggaaatttcaaaggtttgggagtggggagggaaaaaagctcagtcagtgaggatcattttatcacattagactggggcagaactctgccaggatttaggaatattttcagaacagattttagatattatttctatccatatattgaaaagaataccattgtcaatcttatttttttaaaagtactcagtgtagaaatcgctagcccttaattcttttccagcttttcatattaatgtatgcagagtctcaccaagctcaaagacactggttgggggtggagggtgccacagggaaagctgtagaaggcaagaagactcgagaatcccccagagttat

SEQ ID NO: 257 - DNA, 3198 bp, Homo sapiens
  gene (1)..(3198): Accession No. NM_002398
atttgaggtgttctgaccagaagaagacagagcggatgatcattcattcaccacgttgacaacctcgcctgtgattgacagctggagtggcagaaagccatgagatttggtagttgggtctgaggggcgctcttttttttccttttctttctttctttctttttttttttttaaactgatttttgggggagagaagatctgcttttttttgcccccgctgctgtcttggaaacggagcgcttttatgctcagtgactcgggcgctttgcttcaggtcccgtagaccgaagatctgggaccagtagctcacgttgctggagacgttaagggatttttcgtcgtgcttttttttttttttttttttttttccgggggagtttgaatatttgtttcttttcacactggccttaaagaggatatattagaagttgaagtaggaagggagccagagaggccgatggcgcaaaggtacgacgatctaccccattacgggggcatggatggagtaggcatcccctccacgatgtatggggacccgcatgcagccaggtccatgcagccggtccaccacctgaaccacgggcctcctctgcactcgcatcagtacccgcacacagctcataccaacgccatggcccccagcatgggctcctctgtcaatgacgctttaaagagagataaagatgccatttatggacaccccctcttccctctcttagcactgatttttgagaaatgtgaattagctacttgtaccccccgcgagccgggggtggcgggcggggacgtctgctcgtcagagtcattcaatgaagatatagccgtgttcgccaaacagattcgcgcagaaaaacctctattttcttctaatccagaactggataacttgatgattcaagccatacaagtattaaggtttcatctattggaattagagaaggtacacgaattatgtgacaatttctgccaccggtatattagctgtttgaaagggaaaatgcctatcgatttggtgatagacgatagagaaggaggatcaaaatcagacagtgaagatataacaagatcagcaaatctaactgaccagccctcttggaacagagatcatgatgacacggcatctactcgttcaggaggaaccccaggcccttccagcggtggccacacgtcacacagtggggacaacagcagtgagcaaggtgatggcttggacaacagtgtagcttcccccagcacaggtgacgatgatgaccctgataaggacaaaaagcgtcacaaaaagcgtggcatctttcccaaagtagccacaaatatcatgagggcgtggctgttccagcatctaacacacccttacccttctgaagaacagaaaaagcagttggcacaagacacgggactcaccatccttcaagtgaacaattggtttattaatgcccggagaagaatagtgcagcccatgatagaccagtccaaccgagcagtaagtcaaggaacaccttataatcctgatggacagcccatgggaggtttcgtaatggacggtcagcaacatatgggaattagagcaccaggacctatgagtggaatgggcatgaatatgggcatggaggggcagtggcactacatgtaaccttcatctagttaaccaatcgcaaagcaagggggaaggctgcaaagtatgccaggggagtatgtagcccggggtggtccaatgggtgtgagtatgggacagccaagttatacccaaccccagatgcccccccatcctgctcagctgcgtcatgggccccccatgcatacgtacattcctggacaccctcaccacccaacagtgatgatgcatggaggaccgccccaccctggaatgccaatgtcagcatcaagccccacagttcttaatacaggagacccaacaatgagtggacaagtcatggacattcatgctcagtagcttaagggaatatgcattgtctgcaatggtgactgatttcaaatcatgttttttctgcaatgactgtggagttccattcttggcatctactctggaccaaggagcatccctaattcttcatagggacctttaaaaagcaggaaataccaactgaagtcaatttgggggacatgctaaataactatataagacattaagagaacaaagagtgaaatattgtaaatgctattatactgttatccatattacgttgtttcttatagattttttaaaaaaaatgtgaaatttttccacactatgtgtgttgtttccatagctcttcacttcctccagaagcctccttacattaaaaagccttacagttatcctgcaagggacaggaaggtctgatttgcaggatttttagagcattaaaataactatcaggcagaagaatctttcttctcgcctaggatttcagccatgcgcgcgctctctctctttctctctcttttcctctctctccctctttctagcctggggcttgaatttgcatgtctaattcatttactcaccatatttgaattggcctgaacagatgtaaatcgggaaggatgggaaaaactgcagtcatcaacaatgattaatcagctgttgcaggcagtgtcttaaggagactggtaggaggaggcatggaaaccaaaaggccgtgtgtttagaagcctaattgtcacatcaagcatcattgtccccatgcaacaaccaccaccttatacatcacttcctgttttaagcagctctaaaacatagactgaagatttatttttaatatgttgactttatttctgagcaaagcatcggtcatgtgtgtattttttcatagtcccaccttggagcatttatgtagacattgtaaataaattttgtgcaaaaaggactggaaaaatgaactgtattattgcaatttttttttgtaaaagtagcagtttggtatgagttggcatgcatacaagatttactaagtgggataagctaattatactttttgttgtggataaacaaatgcttgttgatagcctttttctatcaagaaaccaaggagctaattattaataacaatcattgcacactgagtcttagcgtttctgatggaaacagtttggattgtataataacgccaagcccagttgtagtcgtttgagtgcagtaatgaaatctgaatctaaaataaaaacaagattatttttgtcaaaaaaaaaaaaaaaaaa

SEQ ID NO: 258 - DNA, 2856 bp, Homo sapiens
  gene (1)..(2856): Accession No. NM_004689
gcggccctcccgtccctgcgcggcctcggcggcctcggcggcggcggcggcggcggcggcggcagcagcgcggcccctttaaacgcctgcggcgccccccgcccccgccatcgcgcctccattttcccggccgcccgcgccgagcgccgcgcccgccccgggcccctccgccgccgccggcccggacatggccgccaacatgtacagggtcggagactacgtctactttgagaactcctccagcaacccatacctgatccggagaatcgaggagctcaacaagacggccaatgggaacgtggaggccaaagtggtgtgcttctaccggaggcgggacatctccagcaccctcatcgccctggccgacaagcacgcaaccctgtcagtctgctataaggccggaccgggggcggacaacggcgaggaaggggaaatagaagaggaaatggagaatccggaaatggtggacctgcccgagaaactaaagcaccagctgcggcatcgggagctgttcctctcccggcagctggagtctctgcccgccacgcacatcaggggcaagtgcagcgtcaccctgctcaacgagaccgagtcgctcaagtcctacctggagcgggaggatttcttcttctattctctagtctacgacccacagcagaagaccctgctggcagataaaggagagattcgagtaggaaaccggtaccaggcagacatcaccgacttgttaaaagaaggcgaggaggatggccgagaccagtccaggttggagacccaggtgtgggaggcgcacaacccactcacagacaagcagatcgaccagttcctggtggtggcccgctctgtgggcaccttcgcacgggccctggactgcagcagctccgtccgacagcccagcctgcacatgagcgccgcagctgcctcccgagacatcaccctgttccacgccatggatactctccacaagaacatctacgacatctccaaggccatctcggcgctggtgccgcagggcgggcccgtgctctgcagggacgagatggaggagtggtctgcatcagaggccaaccttttcgaggaagccctggaaaaatatgggaaggatttcacggacattcagcaagattttctcccgtggaagtcgctgaccagcatcattgagtactactacatgtggaagaccaccgacagatacgtgcagcagaaacgcttgaaagcagctgaagctgagagcaagttaaagcaagtttatattcccaactataacaagccaaatccgaaccaaatcagcgtcaacaacgtcaaggccggtgtggtgaacggcacgggggcgccgggccagagccctggggctggccgggcctgcgagagctgttacaccacacagtcttaccagtggtattcttggggtccccctaacatgcagtgtcgtctctgcgcatcttgttggacatattggaagaaatatggtggcttgaaaatgccaacccggttagatggagagaggccaggaccaaaccgcagtaacatgagtccccacggcctcccagcccggagcagcgggagccccaagtttgccatgaagaccaggcaggctttctatctgcacacgacgaagctgacgcggatcgcccggcgcctgtgccgtgagatcctgcgcccgtggcacgctgcgcggcacccctacctgcccatcaacagcgcggccatcaaggccgagtgcacggcgcggctgcccgaagcctcccagagcccgctggtgctgaagcaggcggtacgcaagccgctggaagccgtgcttcggtatcttgagacccacccccgcccccccaagcctgaccccgtgaaaagcgtgtccagcgtgctcagcagcctgacgcccgccaaggtggcccccgtcatcaacaacggctcccccaccatcctgggcaagcgcagctacgagcagcacaacggggtggacggcaacatgaagaagcgcctcttgatgcccagtaggggtctggcaaaccacggacaggccaggcacatgggaccaagccggaacctcctgctcaacgggaagtcctaccccaccaaagtgcgcctgatccgggggggctccctgcccccagtcaagcggcggcggatgaactggatcgacgccccggatgacgtgttctacatggccacagaggagaccaggaagatccgcaagctgctctcatcctcggaaaccaagcgtgctgcccgccggccctacaagcccatcgccctgcgccagagccaggccctgccgccgcggccaccgccacctgcgcccgtcaacgacgagcccatcgtcatcgaggactaggggccgcccccacctgcggccgccccccgcccctcgcccgcccacacggccccttcccagccagcccgccgcccgcccctcagtttggtagtgccccacctcccgccctcacctgcagagaaacgcgctccttggcggacactgggggaggagaggaagaagcgcggctaacttattccgagaatgccgaggagttgtcgtttttagctttgtgtttactttttggctggagcggagatgaggggccaccccgtgcccctgtgctgcggggccttttgcccggaggccgggccctaaggttttgttgtgttctgttgaaggtgccattttaaattttatttttattactttttttgtagatgaacttgagctctgtaacttacacctggaatgttaggatcgtgcggccgcggccggccgagctgcctggcggggttggcccttgtcttttcaagtaattttcatattaaacaaaaacaaagaaaaaaaatcttataaaaaggaaaaaaaaaaaaaaaaaa

SEQ ID NO: 259 - DNA, 7986 bp, Homo sapiens
  gene (1)..(7986): Accession No. NM_005955
ggaagtgacgttaggggaaggtgggggcaatcatggtgccgctggggaggggagaagctgctgctgccgccgttgccgggagccgcggagacaagtcattacgttttcatttctcacaactgggctgagcacaactgaaccatgggggaacacagtccagacaacaacatcatctactttgaggcagaggaagatgagctgacccccgatgataaaatgctcaggtttgtggataaaaacggactggtgccttcctcatctggaactgtttatgataggaccactgttcttattgagcaggaccctggcactttggaggatgaagatgacgacggacagtgcggagaacacttgccttttctagtagggggtgaagagggctttcacctgatagatcatgaagcaatgtcccagggttatgtgcagcacattatctcaccagatcagattcatttgacaataaaccctggttccacacccatgccaagaaatattgaaggtgcaaccctcactctgcagtcggaatgtccggaaacaaaacgtaaagaagtaaagcggtaccaatgtacctttgagggctgtccccgcacctacagcacagcaggcaacctgcgaacccaccagaagactcaccgaggagagtacacctttgtctgtaatcaggagggctgtggcaaagccttccttacctcttacagcctcaggatccacgtgcgagtgcacacgaaggagaagccatttgagtgtgacgtgcagggctgtgagaaggcattcaacacactgtacaggctgaaagcacatcagaggcttcacacagggaaaacgtttaactgtgaatctgaaggctgcagcaaatacttcaccacactcagtgatctgaggaagcacattcgaactcatacaggggaaaagccatttcggtgcgatcacgatggctgtggaaaagcatttgcagcaagccaccaccttaaaactcacgttcgtacacatactggtgaaagacccttcttctgccccagtaatggctgtgagaaaacattcagcactcaatacagtctcaaaagtcacatgaaaggtcatgataacaaaggacactcatacaatgcacttccacaacacaatggatcagaggatacaaatcactcactttgtctaagtgacttgagccttctgtccacagattctgaattgcgagaaaattccagtacgacccagggccaggacctcagcacaatttcaccagcaatcatctttgaatcaatgttccagaattcagatgatacggcaattcaggaagatcctcaacagacagcttccttgactgaaagttttaatggtgatgcagagtcagtcagtgatgttccgccatccacaggaaattcagcatctttatctcttccacttgtactgcaacctggcctctccgagccaccccagcctctactacctgcctcagctccgtctgctcctccgcctgctccctccctaggacctggctcccagcaagctgcatttggcaacccccctgctctcttacaacctccagaagtgcctgttccccacagcacacagtttgctgctaatcatcaagagtttcttccgcacccccaggcaccgcagcccattgtaccaggactttctgttgttgctggggcttctgcatcagcagcggcagtggcatcagctgtggcagcaccagccccaccacaaagtactactgagcccctgccagccatggtccagactctgcccctgggtgccaactctgtcctaactaataatcccacaataaccatcaccccaactcccaacacagctatcctgcagtccagcctagtcatgggagaacagaacttacaatggatattaaatggtgccaccagttctccacaaaaccaagaacaaattcagcaagcatctaaagttgagaaggtgttttttaccactgcagtaccagtagccagtagcccagggagctctgtccagcagattggcctcagtgttcctgtgatcatcatcaaacaagaagaggcatgtcagtgtcagtgtgcatgccgggactctgcaaaggagcgggcatccagcaggagaaagggctgctcctccccaccccctccagagccgagcccccaggctcctgatgggcccagcctgcagctcccagcgcagactttctcttcagcccctgttcccgggtcatcatcctctaccttgccctcctcctgtgagcaaagccgacaagcagagactccttcagaccctcagacagaaacattaagtgccatggatgtgtcagagtttctatccctccagagcctggacaccccgtccaatctgattcccattgaagcactactgcagggggaggaggagatgggcctcaccagcagcttctccaagtgaagggcccatgtgtgctcacctctgggaaaagcgggtgagcaggaggcatgaggtacaatgcctgccatcatgggtcagaaatttgaaggatgaagaaatctactgtttgaaatcctcacctttcagacgtattttctttattcacatcccaggagcatccattttaaggaactattctttggaaaaaaacaaaaaacaaaaaaaacaacaaaaaaagctaagttataagtgaactgtttggctgcactgtatgtcacttttgcttgttgtcatgtgaacttggaaactaaggttactcgtgtgcataaaaattctaaatgaaagggtgtggtttccatcaatctgatgctgcccatcgcttgcactggggtctttgtggatcgggcaggagttttcagtgtgttgggtgttgctccttcctatgtgtcttttgaatctgaggctgacatttgcttggaaggccagacccttgctccatcagagagggcagtggcaaaggccagtgaggcagctgtgagttggacagggttcaggtgagatggtgttgtcatttgtgcttagtgttggtggtgctcagggtggataacacgggtcgttctgcagcccgcttcagcacaaataggcagcttaaggcctggctcacaggctgtggggttgatctggctctgcagaggccctaggcagcttgttgactgctgtctgttgatgacgtgtgtgcaaagcaggctctagcaacatgatcactgtccttgccttcctggttctttctctcggttggttgccagggcttgcagatcgcagtgaattttccttggggaacatcgctgttttgtcctagagtgaacttgtggcttatggccagtgctgtttggtggtctgccttctttttaatggtattttcttcctcagagcagaagggctgcattttgcttatcagaagaaggtgcagatttaagggaattcatatgaggtggcatgtaattggcaggccaggtgtcctggttccaggttccagccaggctttgggttgccccctccatctctgcccccctctggattttgcatacagcctcatacagtgcaaacaaggatgtgacttgctcagcttagtcatgtgatttatttaaaaaaaaaaaaaaaagaaacacaaaacgatgatcttctactcagggtatagcaaaacaaaaaaattccctttccaccaaaaagcctgaaatgttgcaataagttatctcatttggaatgtttcattaagttgtgttataggaaaaaattgtgtgtgtgtgttatagaattatatccatatgtctgcctttggctccaagtcattgcctcttaaaataaaagatacaatccatactagcatgaaaagtttccctcaacaggctatattaacatagtcatgagtgctgaccaaactcaccgagctcagaggccaggcatggcctgaggtgcagaataggcctctgcctcccaagagccctttccttgccctgagcaaggagtggtgttccacaaacaaggctgctcttctaagccaacagtgtcaggcaggaagcagccataattttgccttgcattttcattccctaatgtaaagggatctgcattggtcactctcctgttctctgagccattgctcagggccagccaagatattattgagaacagataatttaccttggagccagaggccctccctgcctttagcaaggatgttcagggacagacaaagagggcagtggtggtgaatgttgttactgccatgaggagaaatggcagtaagaaatcttaactacaagcagccaatttctcattccaggaccctagccagaataattgacttctttttttttttgagacagagttttgcttttgttgccctggctggagtgcagtggcgcaatcttggctcaccgcaacctccacttcccaggttcaagcaattctgcctcagcctcccgagtagctgggattacaggcatgcgccaccacgcctggctaattttgtatttttagtagagacggggtttctccatgttggtcaggctggtctcgaactcccaacgtcaggtgatcctcccgcctcagtctcccaaagtgctgggattacaggtgtgagccaccatgcctggtctagggaattgacttctttttgaccttctgcactcccttccccaaaaggattgtggcttctgttgaccattgacctcagcagaagttgataaggcaggaggtttccagtcctcctggaaaaccaactgctgagcatgagttgtccttggctgtctctgggcctcgcacccatgggaagttttgaggtagggcccttgctgtttacaacttctgagagagtagtgatgggaccccaaagtaagcttgtatcagagggcagtaatgaccttcccatatccccatcctgtggtcacctgggatttgggttccctggggcggaagtgggaaataggagcccagggaaggacatctgaagcacccacagtttaaatagcgactcttcttggttagccagggctgtgctcatgttgggccctacccaggtcagtggccttttcactctcaaagatcgggggtgacgaagcagcatcttaaacagtgtttaggctgacagatttttccagttgaagaagctgaagtatctgccttttgagggtgactctagattacaagagagactatcagatccaatcagcttttgaaaaatcaggaatgtgcttaaaatgccagtgagtggttgtgaagatcaggtttatttcccaggataggcagtctttctttccctccttttccagttctcttttcctacctgtccttccataagcctggtctctagtgccgaggaccttggagaagagagggcccctagctaagctggagccagaaagaaccttcatggtgagtgtggtttcccaaacttgggaaatgaacctagggtgaggttagggaggatttgtagaattctagcaggtaaaaatcaagcctttttcccctcccatagtaaacttaaccattttcaccctgtacgttatcttctagctcctactaacatctccaattagacaaccgcttcaaagggtgcttagcaccagggattggggttcatggacttaggaggtggtaaggaaactggctggcaccaccaaactgccttagtgaacttggcccttcccaggcaggtaggttgggcattgagggaaggtggcccagtctttgctggcagggtctggccagtctcatgggggcaccaccagtttggtgacagaagtggtgtcatttattgaattccacctccgtttagaaggagatcatggtacaaagcccaggaggggccttaagatgtgaagatctctctgagtaaaaggcaaggggcttctcttcttcacctctgggatagttggtagatcggagagttttattttcagggtcaaggctgtggactgatggggatattggagggtgggtgggttttcctgagagactttgtataatgctgaatgtgtccagagggacaagtttgcagaacctcatattggtatattaaagaaataataaaataaaaaagcactttaggttattttatctttaacccgattgctgcaatttcttttgtgtgtatatatacatatatatactttccacaaagttttattttttgctcagaataaaaagttaaattgaggtgtgaaaagaaaagcacttaccttggtgcaatatgtgtagcttgatggtcgttgtcccatgtggccctggcctggcagcgtttttccgctcaatcagccctgtgctgtgagactgtccatagggaaacactattatgcattctcagcaaccgctcaatctatgcaagccttccctgtgtgccccagggcgccccctcaggctctctgaagaactgctgtgggtcctgttttctgctgactgttgaggccctttttcatcacttcttggtctctcgccatcttttccctcttcaccattacaaaatgatgcctgaaaggaaggaacagattgttcctaggtagaaacctggcaccttctagacttttatatttgtaatcacatccattgtccttaaagacttttccagagtgattgaaaccattgatttgtggaactgcaacaatatttctcaagagtttacaattgtcttacaccaccaatcagaaatatgtttggggaggcatgggtggcagggggcaacatgagccatttccatactgctccccatactacctgtgttggttccttaagcaaaaaggcctccagccttcattaaatcctataaacaaacattacatcccatgaatcattatcaactttcttcctttactccacctcccccattttatcttcaattctcaggctatagaatagacaagttttagaatatacttcagccaaagcagaaggattttcatagatccaatatgcaaatagttctgctgtgacatagatcagaaattgtctgttccttaatatttgggggtggaggcaacaaaactgaagcatatttctgattggttagccattttggcctgtttcctcttgcatgttttttagggagagagggaaacagtcctgtatttcttctgatgccctttggggaagccgacgaccactgggcatttctcactgttactcctgttcaagagagggcttctcagtctgcactgaaaaatgcaaattaaactggatctttatgtcaatgtgtacatagtacaagcttttttactggaattgaggtttaaaaccacacactgcccttttggtggtgtgcctgttgggccaaaaattgggtgataatgtagtgtcactttctcagctcaatgcagtttctactttttcttatgggaaaatttttcataaaacctttttgcaccaaaacccaggggtgttttttgcaatatccttgttatcctcgtagtgtgccaagtcagaggctttctcttgcccttttcctgctgtgttctcaggcctcccaagggctatttgactcaacagtctacatccttcgttgtgttttggagaatgtgggggtgggggtcagagttcaaggtgtctgttcccttttcctgtgaactctttctagtccctatttggggagggtggctggaaacagatttttgctgaatttctggctcagatcttctagccaggaaaggcaagagcccccaagagcccttttttttgacatacactaatcattggccggggtcttggtgacaacttttaaaatcccaaatagttttatttggattatgtaaaagtaagtgtgaaacatgggaacaacggacttccactgagcgatgtgaaaacgttacaggttcagtacttccaaaggaagaaacctccaaacccaaaaaagaataaatatgaatttgtatttttgaagaatgtgaaataatggtgtttgcttaattgctcattttgtataaacttaatattgtactttaaaatatctgctaaaaagtgaaaatttaactttttggaattgaaaaagcaatattaaatactaatgaaatcctaattaaatgcttatttaaatctggtaaaaaaaaaaaaaaa

SEQ ID NO: 260 - DNA, 2862 bp, Homo sapiens
  gene (1)..(2862): Accession No. NM_002468
agattcctacttcttacgccccccacatcacccgcctcgagacctcaagggtagaggtgggcacccccgcctccgcacttttgctcggggctccagattgtagggcagggcggcgcttctcggaaagcgaaagccggcggggcggggcgggtgccgcaggagaaagaggaagcgctggcagacaatgcgacccgaccgcgctgaggctccaggaccgcccgccatggctgcaggaggtcccggcgcggggtctgcggccccggtctcctccacatcctcccttcccctggctgctctcaacatgcgagtgcggcgccgcctgtctctgttcttgaacgtgcggacacaggtggcggccgactggaccgcgctggcggaggagatggactttgagtacttggagatccggcaactggagacacaagcggaccccactggcaggctgctggacgcctggcagggacgccctggcgcctctgtaggccgactgctcgagctgcttaccaagctgggccgcgacgacgtgctgctggagctgggacccagcattgaggaggattgccaaaagtatatcttgaagcagcagcaggaggaggctgagaagcctttacaggtggccgctgtagacagcagtgtcccacggacagcagagctggcgggcatcaccacacttgatgaccccctggggcatatgcctgagcgtttcgatgccttcatctgctattgccccagcgacatccagtttgtgcaggagatgatccggcaactggaacagacaaactatcgactgaagttgtgtgtgtctgaccgcgatgtcctgcctggcacctgtgtctggtctattgctagtgagctcatcgaaaagaggtgccgccggatggtggtggttgtctctgatgattacctgcagagcaaggaatgtgacttccagaccaaatttgcactcagcctctctccaggtgcccatcagaagcgactgatccccatcaagtacaaggcaatgaagaaagagttccccagcatcctgaggttcatcactgtctgcgactacaccaacccctgcaccaaatcttggttctggactcgccttgccaaggccttgtccctgccctgaagactgttctgaggccctgggtgtgtgtgtatctgtctgcctgtccatgtacttctgccctgcctcctcctttcgttgtaggaggaatctgtgctctacttacctctcaattcctggagatgccaacttcacagacacgtctgcagcagctggacatcacatttcatgtcctgcatggaaccagtggctgtgagtggcatgtccacttgctggattatcagccaggacactatagaacaggaccagctgagactaagaaggaccagcagagccagctcagctctgagccattcacacatcttcaccctcagtttcctcacttgaggagtgggatggggagaacagagagtagctgtgtttgaatccctgtaggaaatggtgaagcatagctctgggtctcctgggggagaccaggcttggctgcgggagagctggctgttgctggactacatgctggccactgctgtgaccacgacactgctggggcagcttcttccacagtgatgcctactgatgcttcagtgcctctgcacaccgcccattccacttcctccttccccacagggcaggtggggaagcagtttggcccagcccaaggagaccccaccttgagccttatttcctaatgggtccacctctcatctgcatctttcacacctcccagcttctgcccaaccttcagcagtgacaagtccccaagagactcgcctgagcagcttgggctgcttttcatttccacctgtcaggatgcctgtggtcatgctctcagctccacctggcatgagaagggatcctggcctctggcatattcatcaagtatgagttctggggatgagtcactgtaatgatgtgagcagggagccttcctccctgggccacctgcagagagctttcccaccaactttgtaccttgattgccttacaaagttatttgtttacaaacagcgaccatataaaagcctcctgccccaaagcttgtgggcacatgggcacatacagactcacatacagacacacacatatatgtacagacatgtactctcacacacacaggcaccagcatacacacgtttttctaggtacagctcccaggaacagctaggtgggaaagtcccatcactgagggagcctaaccatgtccctgaacaaaaattgggcactcatctattccttttctcttgtgtccctactcattgaaaccaaactctggaaaggacccaatgtaccagtatttatacctctaatgaagcacagagagaggaagagagctgcttaaactcacacaacaatgaactgcagacacagctgttctctccctctctccttcccagagcaatttatactttaccctcaggctgtcctctggggagaaggtgccatggtcttaggtgtctgtgccccaggacagaccctaggaccctaaatccaatagaaaatgcatatctttgctccactttcagccaggctggagcaaggtaccttttcttaggatcttgggagggaatggatgcccctctctgcatgatcttgttgaggcatttagctgccatgcacctgtccccctttaatactgggcattttaaagccatctcaagaggcatcttctacatgttttgtacgcattaaaataatttcaaagatatctgagaaaagccgatatttgccattcttcctatatcctggaatatatcttgcatcctgagtttataataataaataatattctaccttggaaaaaaaaaaaaaaa

SEQ ID NO: 261 - DNA, 10812 bp, Homo sapiens
  gene (1)..(10812): Accession No. NM_015678
gcggcgtcggggcttcacaacaacagtggtggccgtagcagcggccgggccgggctgaggcgcaggcggggagcgggcccggcgccgcggcgctggtggatgctggggctccgaggcgacggccggggggcgggggccgaggcaggtataacggtaccggcggcggcagcgccgctgctcttcccttctcctcaggaggggggccaatggctagcgagaagccgggcccgggcccggggctcgagcctcagcccgtggggctcattgccgtcggggccgctggcggaggcggcgggggcagcggtggtggcggcaccgggggcagcgggatgggggagctaaggggggcgtccggctccggctcggtgatgctccccgcggggatgattaacccttcggtgccgatccgcaacatccggatgaaattcgcagtgttgattggactcatacaggtcggagaggtcagcaacagggacatcgtggagacggtgctcaacctgctggttggtggagaatttgacttggagatgaactttattatccaggatgctgagagtataacatgtatgacagagcttttggagcactgtgatgtaacatgtcaagcagaaatatggagcatgtttacagccattctacgaaaaagtgttcggaatttacagactagcacagaagttgggctaattgaacaagtattgctgaaaatgagtgctgtagatgacatgatagcagatcttctagttgatatgttgggggttcttgccagctacagcatcactgtcaaggagttgaagcttttgttcagcatgcttcgaggagaaagtggaatctggccaagacatgcagtaaaattattatcagttcttaatcagatgccacagagacacggtcctgatacttttttcaatttccctggttgtagcgctgcggcaattgccttgcctcctattgcaaagtggccttatcagaatggcttcaccttaaacacttggtttcgtatggatccattaaataatattaatgttgataaggataaaccttatctttattgttttcgtactagcaaaggagttggttactctgctcattttgttggcaactgtttaatagtcacatcattgaagtccaaaggaaaaggttttcagcattgtgtgaaatatgattttcaaccacgcaagtggtacatgatcagcattgtccacatttacaatcgatggaggaacagtgaaattcggtgttatgttaatggacaactggtatcttatggtgatatggcttggcatgttaacacaaatgatagctatgacaagtgctttcttggatcatcagaaactgctgatgcaaatagggtattctgtggtcaacttggtgccgtgtatgtgttcagtgaagcactcaacccagcacagatatttgcaattcatcagttaggacctggatataagagtaccttcaagtttaaatctgagagtgatattcatttggcagaacatcataaacaggtgttatatgatgggaaacttgcaagtagcattgcctttacatataatgctaaggccactgatgctcagctctgcctggaatcatcaccaaaagagaatgcatcaatttttgtgcattccccacatgctctaatgcttcaggatgtgaaagcgatagtaacacattcaattcatagtgcaattcattcaattggagggattcaagtgctttttccactttttgcccaattggataataggcagctcaatgacagtcaagtggaaacaactgtctgtgctactctgttggcattcctggttgaactacttaaaagttcagtagccatgcaagaacagatgctgggtggaaaaggctttttagtcattggctacttacttgaaaagtcatcaagagttcatataactagagctgtcctggagcaatttttatcttttgcaaaataccttgatggtttatctcatggagcacctttgctgaagcagctttgtgatcacattttatttaacccagccatctggatacatacacctgcaaaggttcagctttccctatacacatatttgtctgctgaatttattggaactgctaccatctacaccaccatacgcagagtaggaacagtattacagctaatgcacaccttaaaatattactactgggttattaatcctgctgacagtagtggcattacacctaaaggattagatggtccccggccatcacaaaaagaaattatatcactgagggcatttatgctactttttctgaaacagctgatactaaaggatcgaggggtcaaggaagatgaacttcagagtatattaaattacctacttacgatgcatgaggatgaaaatattcatgatgtgctacagttactggtggctttaatgtcggaacacccagcctcaatgataccagcatttgatcaaagaaatggaataagggtgatctacaaattattggcttctaaaagtgaaagtatttgggttcaagctttgaaggttctgggatactttctgaagcatttaggtcacaagagaaaagttgaaattatgcacacccatagtcttttcactcttcttggagaaaggctgatgttgcatacaaacactgtgactgtcaccacatacaacacactttatgagatcttgacagaacaagtatgtactcaggtcgtacacaaaccacatccagagccagattctacagtgaaaattcagaatccaatgattcttaaagtggtggcaactttgttaaaaaactctacaccaagtgcagagctgatggaagttcgtcgtttatttttatctgatatgataaaacttttcagtaacagccgtgaaaatagaagatgcttattgcagtgttcagtgtggcaggattggatgttttctcttggctatatcaatcctaaaaattctgaggaacagaagattaccgaaatggtctacaatatcttccggattcttttgtatcatgcaataaaatatgaatggggaggctggagagtctgggtggataccctctcaatagcccattccaaggtcacttatgaagctcataaggaatacctagccaaaatgtatgaggaatatcaaagacaagaggaggaaaacattaaaaagggaaagaaagggaatgtgagcaccatctctggtctttcatcacagacaacaggagcaaaaggtggaatggaaattcgagagatagaagatctttcacaaagccagagcccagaaagtgagaccgattaccctgtcagcacagatactcgagacttactcatgtcaacaaaagtgtcagatgatattcttggaaattcagatagaccaggaagtggtgtacatgtggaagtacatgatcttttagtagatataaaagcagagaaagtggaagcaacagaagtaaagctcgatgatatggatttatcaccggagactttagtaggtggagagaatggtgcccttgtggaggttgaatctctgttggataatgtatatagtgctgctgttgagaaactccagaacaatgtacatggaagtgttggtatcattaaaaaaaatgaagaaaaggataatggtccattgataacattagcagatgagaaagaagaccttcccaatagtagtacatcatttctctttgataaaatacccaaacaggaggaaaaactacttcctgaactttctagcaatcacattattccaaatattcaggacacacaagtacatcttggtgttagtgatgatcttggattgcttgctcacatgaccggtagcgtagacttaacttgtacatccagtataatagaagaaaaagaattcaaaatccatacaacttcagatggaatgagcagtatttctgaaagagacttagcgtcatcaactaaggggctggagtatgctgaaatgactgctacaactctggaaactgagtcttctagtagcaaaattgtaccaaatattgatgcaggaagtataatttcagatactgaaaggtctgacgatggcaaagaatcaggaaaagaaatccgaaaaatccaaacaactactacgacacaagctgtgcagggtcggtctatcacccaacaagaccgagatctccgagttgatttaggatttcgaggaatgccaatgactgaggaacagcgacgccagtttagcccaggtccacggactacaatgtttcgtattcctgagtttaaatggtctccaatgcaccagcggcttctcactgatttactatttgcattagaaactgatgtacatgtttggaggagccattctacaaagtctgtaatggattttgtcaatagcaatgaaaatattatttttgtacataacacaattcacctcatttcccaaatggtagacaacatcatcattgcttgtggaggaattttacctttgctctctgctgctacatcaccaactggttctaagacggaattggaaaatattgaagtgacacaaggcatgtcagctgagacagcagtaactttcctcagccggctgatggctatggttgatgtacttgtgtttgcaagctctctaaattttagtgagattgaagctgagaaaaacatgtcttctggaggtttaatgcgacagtgcctaagattagtttgttgtgttgctgtgagaaactgtttagaatgtcggcaaagacagagagacaggggaaataaatcttcccatggaagcagtaaacctcaggaagttcctcaaagtgtgactgctacagcagcttcgaagactccattggaaaatgttccaggtaacctttctcctattaaggatccggatagacttcttcaggatgttgatatcaatcgccttcgtgctgttgtctttcgggatgtggatgatagcaaacaagcacagttcttagctctggctgttgtttacttcatttcggttctgatggtttccaagtatcgtgacatattagaaccccagagagagactacaagaactggaagccaaccaggtagaaacatcaggcaagaaataaattcaccaacaagtacagttgtggtcataccatctatccctcatccaagtttgaaccatggattccttgccaagttaattcctgagcagagctttggccactcattttacaaagaaacacctgctgcatttccagacaccataaaagaaaaagaaacaccaactcctggtgaagatattcaggtagaaagttcaattccccatacagattcaggaattggagaggagcaagtggctagcatcctgaatggggcagaattagaaacaagtacaggccctgatgccatgagtgaactcttatccactttgtcatccgaagtgaagaaatcacaagagagcttaactgaaaatcctagtgaaacgttgaagcctgcaacatccatatctagcattagtcaaaccaaaggcatcaatgtgaaggaaatactgaaaagtcttgtggctgctccagttgaaatagcagaatgtggccctgaacctatcccatacccagatccagcattgaagagagaaacacaagctattcttcctatgcagtttcattcctttgacaggagtgttgtggtgcctgtaaagaaaccacctccaggtagtttagctgtaaccactgtgggagccactactgctggaagtgggctgccaacaggcagtacctctaatatatttgctgctactggagctacaccaaaaagtatgattaatacaacaggtgccgtggattcagggtcctcctcctcttcctcctcttctagttttgtgaatggtgctactagcaaaaaccttccagctgtacaaactgttgctccaatgccagaagattcagctgaaaatatgagcatcactgcaaaacttgaaagagcgttagaaaaagttgctcctcttcttcgtgaaatttttgtagactttgccccattcctatctcgtacacttcttggcagtcatggacaagagctattgatagaaggccttgtttgtatgaagtccagcacatctgtggttgagcttgttatgctgctttgttctcaggaatggcaaaactctattcagaagaatgcaggacttgcatttattgagctcatcaatgaaggaagattactgtgccatgctatgaaggaccatatagtccgtgttgcaaatgaagctgagtttattttgaacagacaaagagccgaggatgtacataaacatgcagagtttgagtcacagtgtgcccaatatgctgctgatagaagagaggaagaaaagatgtgtgaccatcttatcagtgctgctaaacatcgagatcatgtaacagcaaatcagctgaaacagaagattctcaatattctcacaaataaacatggtgcttggggagcagtttctcatagccaattgcatgatttctggcgtttggattactgggaagatgatcttcgtcgaaggagacgatttgttcgcaatgcatttggctccactcatgctgaagcattgctgaaagctgcaatagaatatggcacggaagaagatgtagtaaagtcaaagaaaacattcagaagtcaagcaatagtgaaccaaaatgcagagacagaacttatgctggaaggagacgatgatgcagtcagtctgctacaggagaaagaaattgacaaccttgcaggcccagtggttctcagcacccctgcccagctcatcgctcccgtggtggtggccaaggggactctctccatcaccacgacagaaatctacttcgaggtagatgaggatgattctgccttcaagaagatcgacacgaaagttcttgcatacactgagggacttcacggaaaatggatgttcagcgagatacgagctgtattttcaagacgttaccttctacaaaacactgctttggaagtatttatggcaaaccgaacctcagttatgtttaatttccctgatcaagcaacagtaaaaaaagttgtctatagcttgcctcgggttggagtagggaccagctatggtctgccacaagccaggaggatatcattggccactcctcgacagctttataaatcttccaatatgactcagcgctggcaaagaagggaaatttcaaacttcgaatatttgatgttccttaatactattgcaggacggacatataatgatctgaaccaatatccagtgtttccgtgggtgttaaccaactatgaatcagaagagttggacctgactcttccaggaaacttcagggatctatcaaagccaattggtgctttgaaccccaagagagctgtgttttatgcagagcgttatgagacatgggaagatgatcaaagcccaccctaccattataatacccattattcaacagcaacatctactttatcctggcttgttcgaattgaacctttcacaaccttcttcctcaatgcaaatgatggaaaatttgatcatccagatcgaaccttctcatccgttgcaaggtcttggagaactagtcagagagatacttctgatgtaaaggaactaattccagagttctactacctaccagagatgtttgtcaacagtaatggatataatcttggagtcagagaagatgaagtagtggtaaatgatgttgatcttcccccttgggcaaaaaaacctgaagactttgtgcggatcaacaggatggccctagaaagtgaatttgtttcttgccaacttcatcagtggatcgaccttatatttggctataagcagcgaggaccagaagcagttcgtgctctgaatgtttttcactacttgacttatgaaggctctgtgaacctggatagtatcactgatcctgtgctcagggaggccatggaggcacagatacagaactttggacagacgccatctcagttgcttattgagccacatccgcctcggagctctgccatgcacctgtgtttccttccacagagtccgctcatgtttaaagatcagatgcaacaggatgtgataatggtgctgaagtttccttcaaattctccagtaacccatgtggcagccaacactctgccccacttgaccatccccgcagtggtgacagtgacttgcagccgactctttgcagtgaatagatggcacaacacagtaggcctcagaggagctccaggatactccttggatcaagcccaccatcttcccattgaaatggatccattaatagccaataattcaggtgtaaacaaacggcagatcacagacctcgttgaccagagtatacaaatcaatgcacattgttttgtggtaacagcagataatcgctatattcttatctgtggattctgggataagagcttcagagtttattctacagaaacagggaaattgactcagattgtatttggccattgggatgtggtcacttgcttggccaggtccgagtcatacattggtggggactgctacatcgtgtccggatctcgagatgccaccctgctgctctggtactggagtgggcggcaccatatcataggagacaaccctaacagcagtgactatccggcaccaagagccgtcctcacaggccatgaccatgaagttgtctgtgtttctgtctgtgcagaacttgggcttgttatcagtggtgctaaagagggcccttgccttgtccacaccatcactggagatttgctgagagcccttgaaggaccagaaaactgcttattcccacgcttgatatctgtctccagcgaaggccactgtatcatatactatgaacgagggcgattcagtaatttcagcattaatgggaaacttttggctcaaatggagatcaatgattcaacacgggccattctcctgagcagtgacggccagaacctggtcaccggaggggacaatggggtagtagaggtctggcaggcctgtgacttcaagcaactgtacatttaccctggatgtgatgctggcattagagcaatggacttgtcccatgaccagaggactctgatcactggcatggcttctggtagcattgtagcttttaatatagattttaatcggtggcattatgagcatcagaacagatactgaagataaaggaagaaccaaaagccaagttaaagctgagagcacaagtgctgcatggaaaggcaatatctctggtggaaaaaactcgtctacatcgacctccgtttgtacattccatcacacccagcaatagctgtacattgtagtcagcaaccattttactttgtgtgttttttcacgactgaacaccagctgctatcaagcaagcttatatcatgtaaattatatgaattaggagatgttttggtaattatttcatatattgttgtttattgagaaaaggttgtaggatgtgtcacaagagacttttgacaattctgaggaaccttgtgtccagttgttacaaagtttaagctttgaacctaacctgcatcccatttccagcctcttttcaagctgagaaaaaaaaaaaaaaacacgtttgatactttgtacatcagatgcatcttatttaaaagggatacttttgtaaaagtaaaaccttgtataaagaacaaaatgtttcttaattttattgtggagttacaacttgcatgttccttactcctgttggcttgatggaacaggtgcattcacactatgaaacagaaagatctgtccaaggacacagcttgtatgaaagggttgaatttgggctccatcagtaatttttgacattttcaccaaaatatagtttgcactttttaatctaaagtcatcccttctgagtgaaatttgctcataaagcatttggatactaagccattatttgccattttgggtactttatacaaagaaaattcagccctaccctgcataatttgaagacacagcagaaagggggcttagggatgaggtcctggtttttcttgtataaataggagtcatgggcgttagttctgtagtaataacttcccagcacctggacatctcttccagagttatcccactggcttggtgtgtatacattaggggaggataatctgatgctaactttttttttctctttggttcttgaatagcttagtttctttaataacaagtcaaactttattacaacaataactgaagttattcttttaggttctcgtgaaattctcactgaaagccacattcttagcctaaggcatttcatcttttatgatataaaatgatggctatcaaatgattttccatacattgtactgatcaagttatacacccaggggtatatacactttcttcatgtttcttctttgtatatttggtgactgtatcgtcatagatgtacatattgtgtcggtagggctatgaggcatgttacaggaatgtaattttctcagaatttacactcactcgcagtcatttatttaaaaagataaaacaagataatgggttctttgtattggcactttgcaccagaaacatatcattatttattgatgtgattacttatttgttatccaccttgtactagtaagttttagcactgaattccttcttcactgttgtttgtatttatgaaattctgaaattatggggaatcagcgtaatgattaagttattcatcaccaggctgtaagcaatatcttgagtttgtagcttagaattgggaggatacttaacatctggaagacaagttcatttcatcttgagatcatggtgaaatattttggatatataaattccttaagctattgtaaccatgttttattgcaaagatgtaaaatatgccagatgtgtgtgagttggaaatcaaaaaaagaaaaataaaatatgcaaagaattcaaaaaaaaaaaaaaaaaaaaa

SEQ ID NO: 262 - DNA, 6895 bp, Homo sapiens
  gene (1)..(6895): Accession No. NM_003743
ttccagttacagctatatcagagaatgagttaatctcctcagaaatcactaaatactactctgaggggcttagaaattaacaggttgtttatataattggccttaaatgaggtgagagtgaagagactagagccatctctggaaaacatcattatcccattccccgggaagctaccctctggaactcaagatttgaccatatctgttttgaggattcattatgaacaaagaagtctcccaggtgtgaagtttttcaacatgagtggcctcggggacagttcatccgaccctgctaacccagactcacataagaggaaaggatcgccatgtgacacactggcatcaagcacggaaaagaggcgcagggagcaagaaaataaatatttagaagaactagctgagttactgtctgccaacattagtgacattgacagcttgagtgtaaaaccagacaaatgcaagattttgaagaaaacagtcgatcagatacagctaatgaagagaatggaacaagagaaatcaacaactgatgacgatgtacagaaatcagacatctcatcaagtagtcaaggagtgatagaaaaggaatccttgggacctcttcttttggaggctttggatggatttttctttgttgtgaactgtgaagggagaattgtatttgtgtcagagaatgtaaccagctacttaggttacaatcaggaggaattaatgaatacgagcgtctacagcatactgcacgtgggggatcatgcagaatttgtgaagaatctgctaccaaaatcactagtaaatggagttccttggcctcaagaggcaacacgacgaaatagccatacctttaactgcaggatgctaattcaccctccagatgagccagggaccgagaaccaagaagcttgccagcgttatgaagtaatgcagtgtttcactgtgtcacagccaaaatcaattcaagaggatggagaagatttccagtcatgtctgatttgtattgcacggcgattacctcggcctccagctattacgggtgtagaatcctttatgaccaagcaagatactacaggtaaaatcatctctattgatactagttccctgagagctgctggcagaactggttgggaagatttagtgaggaagtgcatttatgcttttttccaacctcagggcagagaaccatcttatgccagacagctgttccaagaagtgatgactcgtggcactgcctccagcccctcctatagattcatattgaatgatgggacaatgcttagcgcccacaccaagtgtaaactttgctaccctcaaagtccagacatgcaacctttcatcatgggaattcatatcatcgacagggagcacagtgggctttctcctcaagatgacactaattctggaatgtcaattccccgagtaaatccctcggtcaatcctagtatctctccagctcatggtgtggctcgttcatccacattgccaccatccaacagcaacatggtatccaccagaataaaccgccagcagagctcagaccttcatagcagcagtcatagtaattctagcaacagccaaggaagtttcggatgctcacccggaagtcagattgtagccaatgttgccttaaaccaaggacaggccagttcacagagcagtaatccctctttaaacctcaataattctcctatggaaggtacaggaatatccctagcacagttcatgtctccaaggagacaggttacttctggattggcaacaaggcccaggatgccaaacaattcctttcctcctaatatttcgacattaagctctcccgttggcatgacaagtagtgcctgtaataataataaccgatcttattcaaacatcccagtaacatctttacagggtatgaatgaaggacccaataactccgttggcttctctgccagttctccagtcctcaggcagatgagctcacagaattcacctagcagattaaatatacaaccagcaaaagctgagtccaaagataacaaagagattgcctcaattttaaatgaaatgattcaatctgacaacagctctagtgatggcaaacctctggattcagggcttctgcataacaatgacagactttcagatggagacagtaaatactctcaaaccagtcacaaactagtgcagcttttgacaacaactgccgaacagcagttacggcatgctgatatagacacaagctgcaaagatgtcctgtcttgcacaggcacttccaactctgcctctgctaactcttcaggaggttcttgtccctcttctcatagctcattgacagaacggcataaaattctacaccggctcttacaggagggtagcccctcagatatcaccactttgtctgtcgagcctgataaaaaggacagtgcatctacttctgtgtcagtgactggacaggtacaaggaaactccagtataaaactagaactggatgcttcaaagaaaaaagaatcaaaagaccatcagctcctacgctatcttttagataaagatgagaaagatttaagatcaactccaaacctgagcctggatgatgtaaaggtgaaagtggaaaagaaagaacagatggatccatgtaatacaaacccaaccccaatgaccaaacccactcctgaggaaataaaactggaggcccagagccagtttacagctgaccttgaccagtttgatcagttactgcccacgctggagaaggcagcacagttgccaggcttatgtgagacagacaggatggatggtgcggtcaccagtgtaaccatcaaatcggagatcctgccagcttcacttcagtccgccactgccagacccacttccaggctaaatagattacctgagctggaattggaagcaattgataaccaatttggacaaccaggaacaggcgatcagattccatggacaaataatacagtgacagctataaatcagagtaaatcagaagaccagtgtattagctcacaattagatgagcttctctgtccacccacaacagtagaagggagaaatgatgagaaggctcttcttgaacagctggtatccttccttagtggcaaagatgaaactgagctagctgaactagacagagctctgggaattgacaaacttgttcaggggggtggattagatgtattatcagagagatttccaccacaacaagcaacgccacctttgatcatggaagaaagacccaacctttattcccagccttactcttctccttctcctactgccaatctccctagccctttccaaggcatggtcaggcaaaaaccttcactggggacgatgcctgttcaagtaacacctccccgaggtgctttttcacctggcatgggcatgcagcccaggcaaactctaaacagacctccggctgcacctaaccagcttcgacttcaactacagcagcgattacagggacaacagcagttgatacaccaaaatcggcaagctatcttaaaccagtttgcagcaactgctcctgttggcatcaatatgagatcaggcatgcaacagcaaattacacctcagccacccctgaatgctcaaatgttggcacaacgtcagcgggaactgtacagtcaacagcaccgacagaggcagctaatacagcagcaaagagccatgcttatgaggcagcaaagctttgggaacaacctccctccctcatctggactaccagttcaaatggggaacccccgtcttcctcagggtgctccacagcaattcccctatccaccaaactatggtacaaatccaggaaccccacctgcttctaccagcccgttttcacaactagcagcaaatcctgaagcatccttggccaaccgcaacagcatggtgagcagaggcatgacaggaaacataggaggacagtttggcactggaatcaatcctcagatgcagcagaatgtcttccagtatccaggagcaggaatggttccccaaggtgaggccaactttgctccatctctaagccctgggagctccatggtgccgatgccaatccctcctcctcagagttctcttctccagcaaactccacctgcctccgggtatcagtcaccagacatgaaggcctggcagcaaggagcgataggaaacaacaatgtgttcagtcaagctgtccagaaccagcccacgcctgcacagccaggagtatacaacaacatgagcatcaccgtttccatggcaggtggaaatacgaatgttcagaacatgaacccaatgatggcccagatgcagatgagctctttgcagatgccaggaatgaacactgtgtgccctgagcagataaatgatcccgcactgagacacacaggcctctactgcaaccagctctcatccactgaccttctcaaaacagaagcagatggaacccagcaggtgcaacaggttcaggtgtttgctgacgtccagtgtacagtgaatctggtaggcggggacccttacctgaaccagcctggtccactgggaactcaaaagcccacgtcaggaccacagaccccccaggcccagcagaagagcctccttcagcagctactgactgaataaccacttttaaaggaatgtgaaatttaaataatagacatacagagatatacaaatatattatatatttttctgagatttttgatatctcaatctgcagccattcttcaggtcgtagcatttggagcaaaaaaaaaaaaaaaaaaaaaaaaaggagtttgcttttgtcgggagattgaaagatgtttttgtttctttctttgtaaaggccttggatattgaaaaaataccaaggcagaacagttggacaatctatttcttgagccaaatttaattattcttatttttgtaatcagtcattggcttcttatctggatgaaggcttttggaggagaaccaaaacgacaagttccaagaagaagatgaagctccgcctccgccgcttagtcccaaccctgcccaggaagaagggcccgtggggctttgcctgtgcccgtccaccaaaggctgtcatgtgtctcgaaatcagcagccctccccatcccaatcccaggcagcttgtgtgtacaatcagcttctctagcaactctgtatctgttggcttcaagagaatattttgcctccacatatgtaccccttctcctttttttaaagatggatttaaaccaagatgcctccaggaaagaggacgaaatgagtatattcacagaggaatccaaaaaatacagtttgggggaaaatgcaataatttttgatgagatgggtgaaggacaagaagtgagttgtgtcaattattgtagatacaattttctgattaaatctggaaaaataaaaggcagcctgttttttctgcttttattgtattaacagctgaggtagctaaagttatttaaaataaaattaaatttatgatccaagtagcttatttttccctttaaatctcattgtaaatatatttgatttcttgtagaaattgatttccttctgtttaattttatgcttttattatactcttgatttttctaaatttgtgtgtgaaatataacattgattgaattgcagttacatttggttagtaatatttcattattttaataactgtgatgtcatgtatggatttactttggggttcaaatcaaaatgtcactgccagaaagagctgttccagctgatctagagcatactgccctagagtgtccctgggatcatctgaacagaagtgcacaggctacttgtacagagaaaaaattaatactcaaaggaaatcttcattttttagattgactttgggaatttgaattttcatcagtgcaaatataaatttctctatcctgctctgaggctaattggtaccatattttccctttgtgtcttgtgactctgccacatcccatctcatcctggcctctgagtcaagaacccagtgaactgactttctagttctagaagttccgctgcaaggccaggaaagcttgagaaaggtattgtggaagaagcaaaggtagacccccatcactcacctttgtctgcatccctgggcctgtgaatgatgacagcacctgacattctgcaccagctacctctgcctccatggcagagaaaaggccataagaacagtggaagaggagcatggactcagacttcaaggaagaagccatttccccaggtccttccttctgcatctcaccacccctagttacaaataactccattgaacagcatctattcagaaactatgccgaataaaaagattggtggaagggctcatgtggttagcaactatgaaacagaaataggacactcagttacaaacattatctcctttagtttttcagaaaatgcatccctgatttcattcatttccagcttgaaagccagccatattactctagtccctaccaaactgctctagaaggtcatttccattttgtttgtgatatttagacgcgcagacttcaggaagttcacctttaacttcagcattccagatgaagtttcctgactcagtgcttttgcataaggaactagaaaaaaaaagtaaggaaaattggagatgctaacatcctcccccatcccaactgcaccttaaaatatgcatgtcaccttcaaggttttataattgcactgtttgttttatgtatgtacagattaaaattattgctacatttgaggaaaataaaattgcttgcttctatgtaattcctgtcattccacaggaaattcacttttccagctactgaatagaatttgtttaacaacctcatgggttgcctcttcatttacagggaagaaatgaaatgtacatctgcagaaattgccaaagcccaaattaacgagtattataaaaggataataaagcatccctgaagccaaa

SEQ ID NO: 263 - DNA, 8413 bp, Homo sapiens
  gene (1)..(8413): Accession No. NM_015277
gagaggcgccggggctgccgcccggtgctcggcgcgctctcgggagccgcccgcccgctggtcccgcagccttccgggaggaagcggtgccggcagcgtccagggcgcgctctcgggcaccctcacctgccggcgcccggccgcttacccggcagggcgtgcgcagggtagggtgcgggaccggggggacctggaggcagaggggagaaccggccgtccgcgccgcagcacagccgctgggagcgcctcagaccccgcgcggggcgccggctccatggcgaccgggctcggggagccggtctatggactttccgaagacgagggagagtcccgtattctcagagtaaaagttgtttctggaattgatctcgccaaaaaggacatctttggagccagtgatccgtatgtgaaactttcattgtacgtagcggatgagaatagagaacttgctttggtccagacaaaaacaattaaaaagacactgaacccaaaatggaatgaagaattttatttcagggtaaacccatctaatcacagactcctatttgaagtatttgacgaaaatagactgacacgagacgacttcctgggccaggtggacgtgccccttagtcaccttccgacagaagatccaaccatggagcgaccctatacatttaaggactttctcctcagaccaagaagtcataagtctcgagttaagggatttttgcgattgaaaatggcctatatgccaaaaaatggaggtcaagatgaagaaaacagtgaccagagggatgacatggagcatggatgggaagttgttgactcaaatgactcggcttctcagcaccaagaggaacttcctcctcctcctctgcctcccgggtgggaagaaaaagtggacaatttaggccgaacttactatgtcaaccacaacaaccggaccactcagtggcacagaccaagcctgatggacgtgtcctcggagtcggacaataacatcagacagatcaaccaggaggcagcacaccggcgcttccgctcccgcaggcacatcagcgaagacttggagcccgagccctcggagggcggggatgtccccgagccttgggagaccatttcagaggaagtgaatatcgctggagactctctcggtctggctctgcccccaccaccggcctccccaggatctcggaccagccctcaggagctgtcagaggaactaagcagaaggcttcagatcactccagactccaatggggaacagttcagctctttgattcaaagagaaccctcctcaaggttgaggtcatgcagtgtcaccgacgcagttgcagaacagggccatctaccaccgccatcagtggcctatgtacataccacgccgggtctgccttcaggctgggaagaaagaaaagatgctaaggggcgcacatactatgtcaatcataacaatcgaaccacaacttggactcgacctatcatgcagcttgcagaagatggtgcgtccggatcagccacaaacagtaacaaccatctaatcgagcctcagatccgccggcctcgtagcctcagctcgccaacagtaactttatctgccccgctggagggtgccaaggactcacccgtacgtcgggctgtgaaagacaccctttccaacccacagtccccacagccatcaccttacaactcccccaaaccacaacacaaagtcacacagagcttcttgccacccggctgggaaatgaggatagcgccaaacggccggcccttcttcattgatcataacacaaagactacaacctgggaagatccacgtttgaaatttccagtacatatgcggtcaaagacatctttaaaccccaatgaccttggcccccttcctcctggctgggaagaaagaattcacttggatggccgaacgttttatattgatcataatagcaaaattactcagtgggaagacccaagactgcagaacccagctattactggtccggctgtcccttactccagagaatttaagcagaaatatgactacttcaggaagaaattaaagaaacctgctgatatccccaataggtttgaaatgaaacttcacagaaataacatatttgaagagtcctatcggagaattatgtccgtgaaaagaccagatgtcctaaaagctagactgtggattgagtttgaatcagagaaaggtcttgactatgggggtgtggccagagaatggttcttcttactgtccaaagagatgttcaacccctactacggcctctttgagtactctgccacggacaactacacccttcagatcaaccctaattcaggcctctgtaatgaggatcatttgtcctacttcacttttattggaagagttgctggtctggccgtatttcatgggaagctcttagatggtttcttcattagaccattttacaagatgatgttgggaaagcagataaccctgaatgacatggaatctgtggatagtgaatattacaactctttgaaatggatcctggagaatgaccctactgagctggacctcatgttctgcatagacgaagaaaactttggacagacatatcaagtggatttgaagcccaatgggtcagaaataatggtcacaaatgaaaacaaaagggaatatatcgacttagtcatccagtggagatttgtgaacagggtccagaagcagatgaacgccttcttggagggattcacagaactacttcctattgatttgattaaaatttttgatgaaaatgagctggagttgctcatgtgcggcctcggtgatgtggatgtgaatgactggagacagcattctatttacaagaacggctactgcccaaaccaccccgtcattcagtggttctggaaggctgtgctactcatggacgccgaaaagcgtatccggttactgcagtttgtcacagggacatcgcgagtacctatgaatggatttgccgaactttatggttccaatggtcctcagctgtttacaatagagcaatggggcagtcctgagaaactgcccagagctcacacatgctttaatcgccttgacttacctccatatgaaacctttgaagatttacgagagaaacttctcatggccgtggaaaatgctcaaggatttgaaggggtggattaagcaccctgtgcctcgggggtggttgttcttcaagcaagttctgcttgcacttttgcatttgcctaacagacttttgcagaggcgatggcagagagcagctgcaggcatggtccctggagccgagccttcaccacgcactcgtccaagttcggatgcgggaacctggtcccagcttgagttcctgcctttcccaccacaaattatcaactggttgatgtgtacactaattacatttcaggaggacttaatgctatttatgttgtgcctctgcaggcaaagcccttaataaatattttacatcctttctaatgacaatgaatggaattaatcactcaacaggtatagtattacgactcatgtttactttttaaaatgatttagaccgattttcagattttatttcgttatgattaaagatgtctcatgtacttggaaaagtgagcattttttttttttttgtatttcactttcataccaggcttaatgtcaatgacatttttatttttgaagtactctgacacctccaccctctactttattagaattggaaggcaaatttttgtccaaaaacctacagacaagtactttgagagaatttccaatataatattagacataatgataattttttccatactcagaatgaaaaactggatattacgtttttgttttggggtttttttgtacaaatttagctaatagctacaggctgagagaattgtaacatagcatgacaaattttgtgttgacttgaaaggaatcacaccattattccttagaagtaattacatgtgttctaacacatttgagacagggttggactcccatttctcatccgagaaattacttaacccttcctggcgctgtacagtcatcttttattctatttcctctttgctgtttgtagtagagacattttgaatgaaacttggcactgcttgattcaaaactgtggaaaccagatctgtttagtctcctgtttgtatgcgtttgctaatggtagctaaataaccagtttttgttgtaaatgcaccaattctgaaggcactttatgtactacatggaggtcatatctggttttgtttttatttttttatcatgaacattaaatgtgatgatgatttcttttccctgcacacatctttccggtgcaatatctatcaattgtgaatctggctgctggtgtataaaaacctggatgtaaagctgagcctacagacctgtcctcaccaactgttttgtgatttctactcaactacaaagatttatttaatgtactcttaatctaactgagttttgttaccaatgacctgttgcatgcttcaataccgtgtactgcctgagttgtgcctcttgtgtgctagattaaaagtgagacagagacttgacttgatcctctgagctcaagctattgagctggtagtggcagaggactgagggtacctgcacagtttgattcttttccacgtgtaagtctccattgcagaattgtcgtgctttgagaaaacacctgaggcagtgtgggagttgaacgaccctgctgtcctttttaacctgtgttgtcctagaccctgtcggggcagtcaggggacactagagatttgatctcatgcgagtcatcaataggacaaaaaagttgtggtttggggaggtctgtttgttacataaaaaggacctttcggtgtaagaaattgccgtttttaccctgccctggctggcatgtgagaagccatggaaggttgtggttgtaaatgagttgtctaaaggggtgcagaggcctgaggtttctaaaagaaggtagatttctacagagctgagtgttggttcctttttcttattggttgaaaattacctggtagtgatcagaaaacttagatgctatgtaactaaaaaaaaaaaaaaaaaaaaaaaaaaaaaaaaaaaaattcccgctcatgagttttgactattggtgagatgttttccgctacagttaacatgacaaatgtctcagtggcaaaaatcccctttttgtaagcccccatagtctagaggcagttttctttttaagaatcatgccagagcctgagtcgagcagtatgctttcttggtttttgagagtaattgtgtaattgtagagggagaaatccaattctaacctaagaactgggattcttctgtcatcttgtaaaccgtatattgaaaaaaacagaatgtcactaaatgcatattaagtcaagtattggaaagtataaaagaaaaatcattctgacaatttctaagccagaagcaaacaagaattactgaaatctaccccatgaatacttggaaggcagtaattgtgagtgacacctcagttcatcaaccccttaataatatcagcttaattttaatgacaactaaatatgctgaagtgaggatttagtattttttaaaaaagcaaaacaaggttcagtagtcctcagcaattctccaagtttctctctttgcctaaaatggtcatagatcttgatttctctgaatcgtgatgaccacacccagtcatcttcacagcataattgcaggtggcagtaaagagagtgtgctgggtaaggagcagttgctgggtcattccttgggccccgacctgcccggggagtagccctgggggagagagggcagtgttgcctatcccagaggtcccagcagtcacactgctctgcaggccgggctctctttatagccagagaaatcaccttaatgcagtctctttagttgtctgctgaagctgtagttattatgggccacttacatgaggctgagaagtacgtgccggagctcacacactgcctgttgcggttctcttaacatcagttatcacagctgcctgtgggtcccgggtatttccattcctgccccttgttggcccgaggaaggatgtggaaagagcacctggtgggatgaaggtccaacagcctgtgcctctccactgctggccctggagccggcagcagtgaggcattcattgtctgtgttgcggtgtattcccagcttcagtgctcttttcctttttgcctgaaatgtttatgcttctctgcagccagtcctctaacaaatctcaagaacaaaggtaagacacttggtttttgtttccaggacccttcagaaggtgacatcagatattccctaaattcagacaatgagggatacagagcgacttggcatgtattatttctcccatgtaaggacaaagggacagattattattgttatttctgagacagagtcttgctctgtagctcaggctggagtgcagtggctcaatctcagctcaccacaacctctgcctcctggcttcaagcgattcttctgcctcagcctccccgaatagttgggattacaggcacccaccaccacgcctggctaatttttgtatttttagtagagatggtttcaccatgctggccaggctggtcttgaactcctgacctcaggtgatcctcccgcctcagccttccaaagtgctgggattacaagcatgagccaccgcacccggcctcacagtgacagattctgagaaacagcatgcaaaacatttgaaccattttctacatctcccattgttgcatagagagtgtgcaccgctgctatcttgccagatccacactggtcctcccgaaagccaggttcatacacagcaactttttaattattctaacagttacccattaacagtcgactcctgtatttctgagagtcttgtactcacctctgaaatttaaaaacgtataaagagagcctgggttaatcagttctgcagcccctacgtgacactgtgctagttctccttcttctgtctcctccttaccctggccctgcacccctgtacttaagagggagaggtgggaggtgctgtctggtatcatttgctgcctcgccagtagagggtgccgctgtgcagggtaactgcccgcctgctcccttcctgacctcccctgaccccgaagatcactacctctgtcattcaggcattggggtacatcctgataagtcgtgtcagaactgccaatttcaggactgagatgtgtttttaaaaaacaaatccttataaactccactttgtactttagattttaaaactggggaaaaatgtgatattctttggaccacttttttaatttatataagccttaatgaacagtgtctatacatttgcatacacacacccccaccccagagtgttctcagtatgtcagagaaagtgccacagcattaggacgggagcttggagaacgttttctagaaaagggttagcttcctgttggcatgaaattttccaagcaaacctcattaaacatctgttgtttgttaaagatgttccactgaaagcaacgcatgtttcaaaggcacgtctttccgttcgttggttttctgtgtgtaaggagtagcattgctgttggcgcctaacctcgcgtgcactgcattctcaaccccgtaccagtgcatcatcagaagccttcctcgtgaccataactctgtgtctgcagatatgtgttcccgtgtaagccagttttccccttttactcagactgatttcacctagattgtcacggtttccttcatgttaactttgcgtgactttgttcttcctttactactctgtatgtaatatatatacatatatacgtacatatgctgtccaaatatatttgtatatatttgtatagcatttttacacctttattgagtaatctggtttcgaaaggaggtgagagtttagtcccttctgcagttttctccaagctgtgtcctgtgaatttcaacccttggagcctaagaaaaccctaggaagatgatgttaatttgctgtcatttcctaattcaggatctatcatcaaatgaaacatgaaaaaaacagtgacttttaaggtgaaaagagtttcaagcattccaaataaattatcaatgtttcataactttttattataaacccacctcctaataggaagccaagtactatttgatacagtggtaaaaaccaaactaccttgaatttttttaaggcaacttatgaataatgctcattttcacagtcagaatagctttaaaatatggttgaatttgatacacacaggaagttttcttgaagaacaatcctttcgcttttcttttttcttgagagatctaaagagaaactgtagattgttttcctgacagcaaaagactaatgtgacaaaatgaagtcattgtaaagaagcgatgcaacttgtcaaatatttaataaagaattatggaagctggaacattttctac

SEQ ID NO: 264 - DNA, 4810 bp, Homo sapiens
  gene (1)..(4810): Accession No. NM_019094
ggtcgccgcggtgctgctgctcagtgggagcgggtcttcgcaactgtctccgcgtggcgcgcgcctctagccgcccttcccctggcggctacggccggagggagcggaggcgagcgggagtcgggctccatggagagcggcggacaactgggcagaggcggagctttcatctcggcaccctggttccagtgacccgcgctagcgtcccgtcccgcccgcgtcggagcggccgccggccccgggactgaccggcctcgccgcacctcccgcaccgactagcgctcccgggcgctcctgcgcccgactcgccctcgcccccactccccggcggggtggcggcggccgggcccccacggcggcggccggagcagcagcagcagcagcaggagcccgcctctatgatgaagttcaagcccaaccagacgcggacctacgaccgcgagggcttcaagaagcgggcggcgtgcctgtgcttccggagcgagcaggaggacgaggtgctgctggtgagtagcagccggtacccagaccagtggattgtcccaggaggaggaatggaacccgaggaggaacctggcggtgctgccgtgagggaagtttatgaggaggctggagtcaaaggaaaactaggcagacttctgggcatatttgagaaccaagaccgaaagcacagaacatatgtttatgttctaacagtcactgaaatattagaagattgggaagattctgttaatattggaaggaagagagagtggttcaaagtagaagatgctatcaaagttctccagtgtcataaacctgtacatgcagagtatctggaaaagctaaagctgggttgttccccagccaatggaaattctacagtcccttcccttccggataataatgccttgtttgtaaccgctgcacagacctctgggttgccatctagtgtaagatagagagaactgggtaggcctctcccaccatgtgcagtctcatggggagaggcttctttcgtttcctcgtcaaacatctgattgacgcttgcaaactgtctgaatttgccatgcaaggttttcaaacaatttgcatgtttttcagatgctttcaaatctttttttaaaaaaatagtgtaaaatattttaataagccaaagccatgtggaatttttgtttagatgccttaactgtgccacaccccacaaccccctatattattttggttgtctatttctcacagcatattttcagttttttgtccatttgacatcagtctgtggtttattttgtcatcagattacttgtgggtatacctaccccaaaattgttttctcattcacagcattagcatattcagcaaatccatctgtggtgggaattaaaaatattattggtattaaagaaatccattcaccccaaaacttgttttacaggattacaattttaattcaaaatttccagatttgggctatttctgtatgatccaataacttattttgtcacagggcttaatttgccatttttggggatttgtcgactcattttgtctgaattttcacaactggtattatgtcactagctacctgatacggctatttcccttataactcaatagtaccttaacacaaagtataactctgtagagttggtgaatattttagggaaatattagcaaaatgcatgtagtaaagacatcttatgaaaactgtattcatggaatttgatttagcatgctcagttgccagttcccattatcgatactctttctttgcagaataccttagaaccgttatttccctcagtgtagattgctcttaaaatgtattcagttatttagtggcccccacaggagtggagtcttgaaatctaattctaaatgccagtcagtgatgatcgcatcacagttgagtgaaatggccttcctgttcagctgttagagactgaagattgttagggcaccttagaatgtctcatcttttctaggttgtcaacaggtactatttgtcacataactaactttcgaggcactggaacatacctgaactaagaattaaatcttttactttatactcacttaaaatcaagaatcccatctaaaacacataggtaccttatctgaaactcttgcacttccccaaccagggcagaaatgaggtgggagaagtttgactaaaatgagggatgggggaaagtaaaagatgtttttttttttttgagactcgctttgtcacccaggctggagtgcaatggcacaatctcaactcaccgcaacctccgcctcccgggttcaagcgattctcctgcctcagcctcccgagtagttgggattacaggcgcctgcctccatgcctggctaattttgtatttttagtagagacagggtttcttcatgttggtcaggctggtctcaaactcctaacctcgtgatccgcctgcctcgacctcccaaagtgctgggattacaggcatgagccaccatgcccagccaaagatcatttttttatatagacttcagccctttgtaaatattgtaactggggagtatagagtagaaaaaaagtatagttaaaacatttgttctacaaattaacctttaaaaatataattactgctaaaaatagagtgctgttacacttaaggaaaattagtgccattttggaaatgagatcttgtgccataaatacagctgaactgaatataaatgttcacaaattaatgctgtcaaaggaatgagtaaagcagaaaaacttttaaccagcaacatttcaagtacgtagtgtgatcaaacatgatcatccagaatttttatatttttttctttgtacagaggttacatattctgggtgttcttttataaaggaaacattttaaatcccacaaattgacactttctatcttcaatggactaagatttttttggtcagtaatctctgaaatttccttaaattatatacttaacatagcagagaaactggattgtttttgtatataagactgcttccacctgaaatgctgtcataagtactgggggggtgggggagtgcccatcttgtacatgatattcttagaggtaataaggtaatgatgcatgaatttattttataaactcttggactatgtatttgacatgtaaaatatgtacagtattaacgtcaaccatctctttaaagttagcctataaatattgttgtataattttctttggtcagaaacacttggactgaatagtgacactcggtaaggattttcagtgccatttagcaaaacgtctttagtctatgcaactagcaaaaatctgcataatgcaacaacacagttttcacacttcaaattttacatgaggggttcttcacgattctcctggaacccagtctagcaaaatgagaggaaaggccctagggagatttatttctgttaaatagttaactctgctgagtatgacaaatagtgtctactatctcaaccctccaaaatttgcagagtgttgggactgtcatttgtgattttttttttttttttttggtggggtagttgaataaaattgggcagctaaatttttcagttccatgtgcctcccaaataaaaaacagaaaataagtagtttttgtgaattgacttgcagacaaagtagaaactgtgctgcatgatgttattttgtaaacagatgacattttctgaccaggcacatgccatccaattttctgtcaatcacactgttgtataaagcagcagaactgaaggggaaaaatgattgttgtatacactgaattgctttgcatggtctcatttgagataattgatgtaagaatcctgacttttttatatttggaaacatcaaataaaaatggaaaaaatgatcatggctttaaaaaaaaaacaaaaacacacacacatgaactcagatttgcaaaccaggtttctgaaactttgggtaaggtgtatgcttttaactttgaaatgtataaacacccagcggaaacgtatacctttcagtgcatagtgcattgtgtgcttaccctgggttgtttaaacttgtgttcaaatattccccctccaagtgaaagcctgtcgggaattccacagtaacacctttactgttctcccattgatgatcatatacgttacctcttcctagcggtacatttgtatgatccttactactggaattaccgggttaaaaggaaatgcttaccactaagatgtcagtattctcctcatggatattttcagtctcaatgttgccagtctaatagtatagtatgtggttgctttactgctgttctccccacccccgtggagttgtgtcattattttaatgaatgtgagctcttgacttactctagaattctaatacagatactttctgcactagtatcacttttattattgcagttccatttaaaagcataactggctaagtcaccgccccacccgccgcattacatttcctaaaacatactgctgccaaagaccaactgtagaatccttaagtcctgttcaagtgtcacttcattttttattaggggtttcttagttggagggcatgagaaacttggccctttccaatgttgtcttcacattggagtataagaattctctataggactctttaatttttttttttttttggtagagatggggtcttgctgtgttgcccaggctggtctcaaactcctaggcttaagcagtcctccagcctcagccttctcaaagtgctaggatgattggcatgagccacctcgtctggcctgcaggtctttttaagcatttgctgttcaataataagcatcttctttatgcctagtatttgtgataagagcacaaaacaa

SEQ ID NO: 265 - DNA, 1479 bp, Homo sapiens
  gene (1)..(1479): Accession No. NM_016445
gcgaggcgcggggaaggcgcacctggggtggccctggcgtgcgggcggcgacatggaggacggcgtgctcaaggagggcttcctggtcaagaggggccacattgtccacaactggaaggcgcgatggttcatccttcggcagaacacgctggtgtactacaagcttgaggggggtcggagagtgacccctcccaagggccggatcctcctggatggctgcaccatcacctgcccctgcctggagtatgaaaaccgaccgctcctcattaagctgaagactcaaacatccacggagtacttcctggaggcctgttctcgagaggagcgggatgcctgggcctttgagatcaccggggctattcatgcagggcagccggggaaggtccagcagctgcacagcctgagaaactccttcaagctgcccccgcacatcagcctgcatcgcattgtggacaagatgcacgatagcaacaccggaatccgttcaagccccaacatggagcagggaagcacctataaaaagaccttcctcggctcctccctggtggactggctcatctccaacagcttcacggccagccgtctggaggcggtgaccctggcctccatgctcatggaggagaacttcctcaggcctgtgggtgtccgaagcatgggagccattcgctctggggatctggccgagcagttcctggatgactccacagccctgtacacttttgctgagagctacaaaaagaagataagccccaaggaagaaattagcctgagcactgtggagttaagtggcacggtggtgaaacaaggctacctggccaagcagggacacaagaggaaaaactggaaggtgcgtcgctttgttctaaggaaggatccagctttcctgcattactatgacccttccaaagaagagaacaggccagtgggtgggttttctcttcgtggttcactcgtgtctgctctggaagataatggcgttcccactggggttaaagggaatgtccagggaaacctcttcaaagtgattactaaggatgacacacactattacattcaggccagcagcaaggctgagcgagccgagtggattgaagctatcaaaaagctaacatgacaaggacctgagggaaccaggattcctccctcctaccagatgacacagacaagagttcctggagaatgggagtgttaagacttttgacttctttgtaagttttgtactgctttggagagtgaatgctgccaagagttcctcagattacaaacagcagtggtgccatttccttccccatcttcatgttacaaacctggaaaggctagaacagccattaggcgtcagcatcttgacttttccccagcatcacaaacagccatttcctcgggcaccaaagtaggttccctttgttggaacaattacactggccatgccataatgttgaataaaactctcttcttatgagaaaaaaaaaaaaaaaaaaa

SEQ ID NO: 266 - DNA, 2594 bp, Homo sapiens
  gene (1)..(2594): Accession No. NM_032812
gccctaaccttcccagggctcagctctttggagctgcccattcctccggctgcgagaaaggacgcgcgccctgcgtcgggcgaagaaaagaagcaaaacttgtcgggagggtttcgtcatcaacctccttcccgcaaacctaaacctcctgccggggccatccctagacagaggaaagttcctgcagagccgaccagccctagtggatctggggcaggcagcggcgctggctgtggaattagatctgttttgaacccagtggagcgcatcgctggggctcggaagtcaccgtccgcgggcaccgggttggcgctgcccgagtggaaccgacagtttgcgagcctcggctgcaagtggcctctcctccccgcggttgttgttcagtgtcgggtgagggctgcgagtgtggcaagttgcaaagagagcctcagaggtccgaagagcgctgcgctcctactcgcgttcgcttcttcctcttctcggttccctactgtgaaatcgcagcgacatttacaaaggcctccgggtcctaccgagaccgatccgcagcgtttggcccggtcgtgcctattgcatcgggagcccccgagcaccggcgaaggactggcgggtggggtagggaggtggcggcggcggcatggcgaggttcccgaaggccgacctggccgctgcaggagttatgttactttgccacttcttcacggaccagtttcagttcgccgatgggaaacccggagaccaaatccttgattggcagtatggagttactcaggccttccctcacacagaggaggaggtggaagttgattcacacgcgtacagccacaggtggaaaagaaacttggactttctcaaggcggtagacacgaaccgagcaagcgtcggccaagactctcctgagcccagaagcttcacagacctgctgctggatgatgggcaggacaataacactcagatcgaggaggatacagaccacaattactatatatctcgaatatatggtccatctgattctgccagccgggatttatgggtgaacatagaccaaatggaaaaagataaagtgaagattcatggaatattgtccaatactcatcggcaagctgcaagagtgaatctgtccttcgattttccattttatggccacttcctacgtgaaatcactgtggcaaccgggggtttcatatacactggagaagtcgtacatcgaatgctaacagccacacagtacatagcacctttaatggcaaatttcgatcccagtgtatccagaaattcaactgtcagatattttgataatggcacagcacttgtggtccagtgggaccatgtacatctccaggataattataacctgggaagcttcacattccaggcaaccctgctcatggatggacgaatcatctttggatacaaagaaattcctgtcttggtcacacagataagttcaaccaatcatccagtgaaagtcggactgtccgatgcatttgtcgttgtccacaggatccaacaaattcccaatgttcgaagaagaacaatttatgaataccaccgagtagagctacaaatgtcaaaaattaccaacatttcggctgtggagatgaccccattacccacatgcctccagtttaacagatgtggcccctgtgtatcttctcagattggcttcaactgcagttggtgtagtaaacttcaaagatgttccagtggatttgatcgtcatcggcaggactgggtggacagtggatgccctgaagagtcaaaagagaagatgtgtgagaatacagaaccagtggaaacttcttctcgaaccaccacaaccgtaggagcgacaaccacccagttcagggtcctaactaccaccagaagagcagtgacttctcagtttcccaccagcctccctacagaagatgataccaagatagcactacatctaaaagataatggagcttctacagatgacagtgcagctgagaagaaagggggaaccctccacgctggcctcatcattggaatcctcatcctggtcctcattgtagccacagccattcttgtgacagtctatatgtatcaccacccaacatcagcagccagcatcttctttattgagagacgcccaagcagatggcctgcgatgaagtttagaagaggctctggacatcctgcctatgctgaagttgaaccagttggagagaaagaaggctttattgtatcagagcagtgctaaaatttctaggacagaacaacaccagtactggtttacaggtgttaagactaaaattttgcctatacctttaagacaaacaaacaaacacacacacaaacaagctctaagctgctgtagcctgaagaagacaagatttctggacaagctcagcccaggaaacaaagggtaaacaaaaaactaaaacttatacaagataccatttacactgaacatagaattccctagtggaatgtcatctatagttcactcggaacatctcccgtggacttatctgaagtatgacaagattataatgcttttggcttaggtgcagggttgcaaagggatcagaaaaaaaaaatcataataaagctttagttcatgaggg

SEQ ID NO: 267 - DNA, 6104 bp, Homo sapiens
  gene (1)..(6104): Accession No. NM_002844
agaagcgcccggagcccgcggggcgacgtcacccccggctccgcccccgtccctccccgagcaaagtaactcttgactaacaggagcagcctccgccgagcatggagagctgccgccgcggccggccggcgacgctggcgacgctttcgcccctgaggtagtttggcgaccgcgaagaaggaaaaagggcgggcgggcggctgtcctctcaccgtcctcaccccgcgaggcccggcccgctcctccgtcgtggatttcgcggcgatccccccggcagctctttgcaaagctgcttgaaacttctcccaaactcggcatggatacgactgcggcggcggcgctgcctgcttttgtggcgctcttgctcctctctccttggcctctcctgggatcggcccaaggccagttctccgcaggtggctgtacttttgatgatggtccaggggcctgtgattaccaccaggatctgtatgatgactttgaatgggtgcatgttagtgctcaagagcctcattatctaccacccgagatgccccaaggttcctatatgatagtggactcttcagatcacgaccctggagaaaaagccagacttcagctgcctacaatgaaggagaacgacactcactgcattgatttcagttacctattatatagccagaaaggactgaatcctggcactttgaacatattagttagggtgaataaaggacctcttgccaatccaatttggaatgtgactggattcacgggtagagattggcttcgggctgagctagcagtgagcaccttttggcccaatgaatatcaggtaatatttgaagctgaagtctcaggagggagaagtggttatattgccattgatgacatccaagtactgagttatccttgtgataaatctcctcatttcctccgtctaggggatgtagaggtgaatgcagggcaaaacgctacatttcagtgcattgccacagggagagatgctgtgcataacaagttatggctccagagacgaaatggagaagatataccagtagcccagactaagaacatcaatcatagaaggtttgccgcttccttcagattgcaagaagtgacaaaaactgaccaggatttgtatcgctgtgtaactcagtcagaacgaggttccggtgtgtccaattttgctcaacttattgtgagagaaccgccaagacccattgctcctcctcagcttcttggtgttgggcctacatatttgctgatccaactaaatgccaactcgatcattggcgatggtcctatcatcctgaaagaagtagagtaccgaatgacatcaggatcctggacagaaacccatgcagtcaatgctccaacttacaaattatggcatttagatccagataccgaatatgagatccgagttctacttacaagacctggtgaaggtggaacggggctcccaggacctccactaatcaccagaacaaaatgtgcagaacctatgagaaccccaaagacattaaagattgctgaaatacaggcaagacggattgctgtggactgggaatccttgggttacaacattacgcgttgccacacttttaatgtcactatctgctaccattacttccgtggtcacaacgagagcaaggcagactgtttggacatggaccccaaagcccctcagcatgttgtgaaccatctgccaccttatacaaatgtcagcctcaagatgatcctaaccaatccagagggaaggaaggagagtgaagagacaattattcaaactgatgaagatgtgcctggtcccgtaccagtaaaatctcttcaaggaacatcctttgaaaataagatcttcttgaactggaaagaacctttggatccaaatggaatcatcactcaatatgagatcagctatagcagtataagatcatttgatcctgcagttccagtggctggacctccccagactgtatcaaatttatggaacagtacacaccatgtctttatgcatctccaccctggaaccacgtaccagtttttcataagagccagcacggtcaaaggctttggtccagccacagccatcaatgtcaccaccaatatctcagctccaactttacctgactatgaaggagttgatgcctctctcaatgaaactgccaccacaataactgtattgttgagaccagcacaagccaaaggtgctcctatcagtgcttatcagattgttgtggaagaactgcacccacaccgaaccaagagagaagccggagccatggaatgctaccaggttcctgtcacataccaaaatgccatgagtgggggtgcaccgtattactttgctgcagaactccccccgggaaacctacctgagcctgccccgttcactgtgggtgacaatcggacctaccaaggcttttggaaccctcctttggctccgcgcaaaggatacaacatctatttccaggcgatgagcagtgtggagaaggaaactaaaacccagtgcgtacgcattgctacaaaagcagcagcaacagaagaaccagaagtgatcccagatcccgccaagcagacagacagagtggtgaaaatagcaggaattagtgctggaattttggtgttcatcctccttctcctagttgtcatattaattgtaaaaaagagcaaacttgctaaaaaacgcaaagatgccatggggaatacccggcaggagatgactcacatggtgaatgcaatggatcgaagttatgctgatcagagcactctgcatgcagaagatcctctttccatcaccttcatggaccaacataactttagtccaagatatgagaaccacagtgctacagcagagtccagtcgccttctagacgtacctcgctacctctgtgaggggacggaatccccttaccagacaggacagctgcatccagccatcagggtagctgatttactgcagcacattaatctcatgaagacatcagacagctatgggttcaaagaggaatatgagagcttttttgaaggacagtcagcatcttgggatgtagctaaaaaagatcaaaatagagcaaaaaaccgatatggaaacattatagcatatgatcactccagagtgattttgcaacccgtagaggatgatccttcctcagattatattaatgccaactatattgatggctaccagagaccaagtcattacattgcaacccaaggtcccgttcatgaaacagtgtatgatttctggaggatgatttggcaagaacaatctgcttgcattgtgatggttacaaatttagttgaggttggccgggttaaatgctataaatattggcctgatgatactgaagtttatggtgacttcaaagtaacgtgtgtagaaatggaaccacttgctgaatatgtagttaggacattcaccctggaaaggagggggtacaatgaaatccgtgaagttaaacagttccatttcacgggctggcctgaccatggagtgccctaccatgctacagggctgctttcctttatccggcgagtcaagttatcaaaccctcccagtgctggccccatcgttgtacattgcagtgctggtgctggacgaactggctgctacattgtgattgacatcatgctagacatggctgaaagagagggtgttgttgatatttacaattgtgtcaaagccttaagatctcggcgtattaatatggtccagacagaggaacagtacatttttattcatgatgccattttagaagcctgcttatgtggagaaactgccatacctgtctgtgaatttaaagctgcatattttgatatgattagaatagactcccagactaactcttcacatctcaaggatgaatttcagactctgaattcagtcacccctcgactacaagctgaagactgcagtatagcgtgcctgccaaggaaccatgacaagaaccgtttcatggacatgctgccacctgacagatgtctgccttttttaattacaattgatggggagagcagtaactacatcaatgctgctcttatggacagctacaggcaaccagctgctttcatcgtcacacaataccctctgccaaacactgtaaaagacttctggagattagtgtatgattatggctgtacctccattgtgatgttaaacgaagtcgacttgtcccagggctgccctcagtactggccagaggaagggatgctacgatatggccccatccaagtggaatgtatgtcttgttcaatggactgtgatgtgatcaaccggatttttaggatatgcaatctaacaagaccacaggaaggttatctgatggtgcaacagtttcagtacctaggatgggcttctcatcgagaagtgcctggatccaaaaggtcattcttgaaactgatacttcaggtggaaaagtggcaggaggaatgcgaggaaggggaaggccggacgattatccactgcctaaatggtggcgggcgaagtggcatgttctgtgctataggcatcgttgttgaaatggtgaaacggcaaaatgttgtcgatgttttccatgcagtaaagacactgaggaacagcaagccaaacatggtggaagccccggagcaataccgtttctgctatgatgtagctttggagtacctggaatcatcttagttgggtgagactctttaaagtgcatccatgaagaaacctgtccatctattgagccagcagctgttgtacctgttacacttgtgcagaaagattttaatgtggggggtgggagacttttacatttgagaggtaaaagtattttttttatgaagttgtgtatcttaataaaaaggactgaattagtttttattactatattaaagcatcaacatttcatgccacataaattatatttaataagaaccagattgaaatgagaacgtattggtgtttgtacagtgaacatgccaccttttttctcatggtttcagtagagcagctaccacatgttgcatgagttcatactttctacgtggcatttttctccctttctaaaatgaaagctgatgaatcttaaaaggaagaagaaaagaaaagctgtgcaaattcatagtaaagttcgttttttatatgtttccagtgtagcagatctctatataaatatataaatatatataactggcttattttcttttaatgtgcaatgatggctggatcatttaaagttctttttagaaaataacataagccaaagactcaagtgtaaatatgtctatatggagaaagcacattatatttattggttacttacattccttttttgatggctaaaatactaccaccacacaatcatcttttttttcctgaagaaagctttttctttagctaaaatcaattgtaaacgatttttgtagattattttttgtatgttttagtgtaagtagaagataaactttttattcataaaccaggaagcaatgttctttatagtgattctcttgtgtacatgcttgtgaattaaatttgtgtaaaatcccttggcaattgggtcttttaatataggaccaaattaaaacattttgctgaatatgtatagtttttcacaatttcattaggtaaataatggtttggtgatcatacatgagaaatgtacacattaaaaggccttgctgacaacttgcacaatgttgaacatagcctttaagcatcatttaaattttaaaggaatggagtttttcagcctgtggcccagcactggtcaagaaaacaagatggcaacatatatgctttcagggtcaaatttgagcaaactgtaaactgtcagggtgataaaatgtttctcttgatgtttacatgcacaagctttgcgttctgactataaaaagtgtgaacaaatcaatgccagattcctgttttgcgcattgtcatgggattcttaagtgaacctttctaaatgtggtcttgttcacatgctccacgtagctgtaacttcacatcatcagcttgcagtttgtaattgactaaagcattccagtgtcctctttctagattgccagctcatgacatggtgcttataaagatttaattaaagtaagaatgaaataaagtttttataattataacagttaaaaaaaaaaaaaaaaaa

SEQ ID NO: 268 - DNA, 3135 bp, Homo sapiens
  gene (1)..(3135): Accession No. NM_005778
ggccgtcggcggaggcgccattttgtgtagccgccgaaccttgttggaggttctggggcgcagaaccgctactgctgcttcggtctctccttgggaaaaaataaaatttgaaccttttggagctgtgtgctaaatcttcagtgggacaatgggttcagacaaaagagtgagtagaacagagcgtagtggaagatacggttccatcatagacagggatgaccgtgatgagcgtgaatcccgaagcaggcggagggactcagattacaaaagatctagtgatgatcggaggggtgatagatatgatgactaccgagactatgacagtccagagagagagcgtgaaagaaggaacagtgaccgatccgaagatggctaccattcagatggtgactatggtgagcacgactataggcatgacatcagtgacgagagggagagcaagaccatcatgctgcgcggccttcccatcaccatcacagagagcgatattcgagaaatgatggagtccttcgaaggccctcagcctgcggatgtgaggctgatgaagaggaaaacaggtgtaagccgtggtttcgccttcgtggagttttatcacttgcaagatgctaccagctggatggaagccaatcagaaaaagttggtgattcaaggaaagcacattgcaatgcattatagcaatcccagacctaagtttgaagattggctttgtaacaagtgctgccttaacaatttcaggaaaagactaaaatgcttccgatgtggagcagacaagtttgactctgaacaggaagtgcctcctggaaccacagagtcggttcagtctgtggattactactgtgatacgatcattcttcggaacatagctccgcacactgtggtggattccatcatgacagcactgtctccttacgcgtctttagctgtcaataacatccgcctcataaaagacaaacagacccagcagaacagaggcttcgcatttgtgcagctgtcctctgcaatggatgcttctcagctgcttcagatattacagagtctccatcctcctttgaaaattgatggcaaaactattggggttgattttgcaaaaagtgccagaaaagacttggtcctctcagatggtaaccgcgtcagcgccttctctgtagctagtacggctattgctgctgctcagtggtcatccacccagtctcaaagtggtgaaggaggcagtgttgactacagttatctgcaaccaggtcaagatggctatgcccaatatgctcagtattcacaggattatcagcagttttatcaacaacaagctggaggattggaatctgatgcatcatctgcatcaggcacagcagtgaccaccacctcagcggctgtagtgtcccagagtcctcagctgtataatcaaacctccaatccacctggctctccgactgaggaagcacagcctagcactagcacaagtacacaggccccagccgcttcccctactggtgtagttcctggtaccaaatatgcagtacctgacacgtccacttaccagtatgatgaatcttcaggatattactatgatccgacaacagggctctattatgaccccaactcgcaatactactataattccttgacccagcagtacctttactgggatggggaaaaagagacctacgtgccagctgcagagtctagctcccaccagcagtcgggcctgcctcctgcaaaagaggggaaagagaagaaggagaaacccaagagcaaaacagcccagcagattgccaaagacatggaacgctgggctaagagtttgaataagcagaaagaaaactttaaaaatagctttcagcctgtcaattccttgagggaagaagaaaggagagaatctgctgcagcagacgctggctttgctctctttgagaagaagggagccttagctgaaaggcagcagctcatcccagaattggtgcgaaatggagatgaggagaatcccctcaaaaggggtctggttgctgcttacagtggtgacagtgacaatgaggaggagctggtggagagacttgagagtgaggaagagaagctagctgactggaagaagatggcctgtctgctctgccggcgccagttcccgaacaaagatgccctagtcaggcaccagcaactctcagaccttcacaagcaaaacatggacatctaccgacgatccaggctgagcgagcaggagctggaagccttggagctaagggagagagagatgaaataccgagaccgagctgcagaaagacgggagaagtacggcattccagaacctccagagcccaagcgcaagaagcagtttgatgccggcactgtgaattacgagcaacccaccaaagatggcattgaccacagtaacattggcaacaagatgctgcaggccatgggctggcgggaaggctctggcttgggacgaaagtgtcaaggcattacggctcccattgaggctcaagttcggctaaagggagctggcctaggagccaaaggcagcgcatatggtttgtcgggcgccgattcctacaaagatgctgtccggaaagccatgtttgcccggttcactgagatggagtgagagagagagagagagagagatgacaaggagcacaagaagtggtccatctcccgaattcgctgttaccgcctgtctctttaagggcatgccttgtgctgttaatagatcttagggtgaaccacttcattctgcagggttctccctcccaccttaaagaagttccccttatgtgggttgcctggtgaatggccttccttcccgccagagggcttgtgaacagaccggagaggacagtggattgtttatactccagtgtacatagtgtaatgtagcgtgtttacatgtgtagcctatgttgtggtccatcagcccctcacattcctaggggtttgagatgctgtaggtggtatgtgacaccaaagccacctctgtcatttgttgtgatgtcttttcttggcaaaagccttgtgtatatttgtatattacacatttgtacagaattttggaagattttcagtctagttgccaaatctggctcctttacaaaagaaataccttgagaaaaaaaaaaaaaaaaaaaaaaaaaaaaaaaaaaaaaa

SEQ ID NO: 269 - DNA, 2071 bp, Homo sapiens
  gene (1)..(2071): Accession No. NM_001025374
gcccctcacctgaccaatcaagacggccggccgaggcccctggaacggctcaggcggctgcggctgctacggcggcgcatgctaggggattctgccgggtagaagagctgggcctggaacccagccctgaggacatcctgcggcccaggggcaagtgacacctgctgagagaggcccaggatggtggaggctgaggaactggcacagctgcggctgctcaatctggagctcctgaggcagctgtgggtggggcaggatgctgtgcggcggtcagtggccagggcagcctcggagtcaagcctggaatccagcagcagctacaactcagagactccatcgaccccagagacgtcctcaacttccttgagcacctcctgcccacggggccggtcctccgtgtggggcccaccagatgcctgtcgaggggacctccgtgatgtggccagatcgggggtggcctctctcccacctgccaaatgccagcaccaggagtccctgggccgaccgagaccccactcagcaccctcgctgggcacctcaagcctgagggacccagagccctcagggaggctgggtgatccaggaccccaggaggcacagaccccgaggtccatcctggctcaacagagcaagctgtccaagcccagggtgaccttctctgaggagtctgcagttcctaagaggagctggcgcctcaggccatacctgggctatgactggattgcagggtctctggacaccagctcttccatcaccagccagcctgaggccttcttctccaagctgcaggagtttcgggaaaccaacaaggaggagtgtatctgcagccatcctgaaccccagttgccaggcctgcgtgagagcagtggcagcggcgtggaggaagaccatgaatgtgagtgcgggccctcggctaggccgctgagtagtccagcctcgcgctgccctggcctcccctgccccagagcagtcccatttgaggtttggggcctggggaggcccctgagatgttgagactcatggagggaggcctgcagtctggacagggtggccaagccctggtaggggtggagtgagctaaggcctggccaccgaattaggggctgccctgtgtggcaccatcccaccctccccagcagtgcccctgtgctggtgggactccatcccagctcctgagggccccaggaggatgtccctccccaccccttagggcgtgggccccaggttctgggaggaaaggggttaggaggaaatgggccgaagggcttcccagagggattggcagcttgtgtggttgggggccgctgagggcagcacggagcctggggacctgggttcctggctcagggagagctgtggcttctcatgggcctcgcaggcgtgtactgttaccgtgtcaaccggcgcctgttcccggtgcctgtggatcccggtaccccctgccgcctgtgcaggacaccgcgagaccagcagggccctgggaccctggcgcagccagcgcacgtcagggtgagcatcccgctgtcgatcctggagcccccgcaccggtaccacatccaccggcgaaagagctttgacgcctctgacacactggccctgccccggcactgcctgctgggctgggacatttttcctccgaagtctgagaaaagctcagcccccaggaacctggacctctggtcctctgtctccgctgaggcccagcaccagaagctgtccggcaccagcagcccttttcacccggcctcaccaatgcagatgctgcccccgaccccgacctggtcagtgccccaggtccctcggccccacgtcccacggcagaagccctgaggactgactcctgggggagaacagcattcccgccgcctccagcctctcccctctggcaggcgcacccaggagatggaatcccctgcccgcccagctcaggcccagctgtcctaggttgggcaggtgggtggacccaagcttgtctgctgcctgagttccagagagggaggaccctggggtggagggtgagggattctgtggaagtttgtaaataaagctcagtgctctgcagctcaagtcc

SEQ ID NO: 270 - DNA, 595 bp, Homo sapiens
  gene (1)..(595): Accession No. NM_005620
gggcaaggctgggccgggaagggcgtgggttgaggagaggctccagacccgcacgccgcgcgcacagagctctcagcgccgctcccagccacagcctcccgcgcctcgctcagctccaacatggcaaaaatctccagccctacagagactgagcggtgcatcgagtccctgattgctgtcttccagaagtatgctggaaaggatggttataactacactctctccaagacagagttcctaagcttcatgaatacagaactagctgccttcacaaagaaccagaaggaccctggtgtccttgaccgcatgatgaagaaactggacaccaacagtgatggtcagctagatttctcagaatttcttaatctgattggtggcctagctatggcttgccatgactccttcctcaaggctgtcccttcccagaagcggacctgaggaccccttggccctggccttcaaacccaccccctttccttccagcctttctgtcatcatctccacagcccacccatcccctgagcacactaaccacctcatgcaggccccacctgccaatagtaataaagcaatgtcacttttttaaaacatgaaa

SEQ ID NO: 271 - DNA, 521 bp, Homo sapiens
  gene (1)..(521): Accession No. NM_002407
cctccacagcaacttccttgatccctgccacgcacgactgaacacagacagcagccgcctcgccatgaagctgctgatggtcctcatgctggcggccctcctcctgcactgctatgcagattctggctgcaaactcctggaggacatggttgaaaagaccatcaattccgacatatctatacctgaatacaaagagcttcttcaagagttcatagacagtgatgccgctgcagaggctatggggaaattcaagcagtgtttcctcaaccagtcacatagaactctgaaaaactttggactgatgatgcatacagtgtacgacagcatttggtgtaatatgaagagtaattaactttacccaaggcgtttggctcagagggctacagactatggccagaactcatctgttgattgctagaaaccacttttctttcttgtgttgtctttttatgtggaaactgctagacaactgttgaaacctcaaattcatttccatttcaataaactaactgcaaatcact

SEQ ID NO: 272 - DNA, 1984 bp, Homo sapiens
  gene (1)..(1984): Accession No. NM_000062
ctgatttacaggaactcacaccagcgatcaatcttccttaatttgtaactgggcagtgtcccgggccagccaatagctaagactgccccccccgcaccccaccctccctgaccctgggggactctctactcagtctgcactggagctgcctggtgaccagaagtttggagtccgctgacgtcgccgcccagatggcctccaggctgaccctgctgaccctcctgctgctgctgctggctggggatagagcctcctcaaatccaaatgctaccagctccagctcccaggatccagagagtttgcaagacagaggcgaagggaaggtcgcaacaacagttatctccaagatgctattcgttgaacccatcctggaggtttccagcttgccgacaaccaactcaacaaccaattcagccaccaaaataacagctaataccactgatgaacccaccacacaacccaccacagagcccaccacccaacccaccatccaacccacccaaccaactacccagctcccaacagattctcctacccagcccactactgggtccttctgcccaggacctgttactctctgctctgacttggagagtcattcaacagaggccgtgttgggggatgctttggtagatttctccctgaagctctaccacgccttctcagcaatgaagaaggtggagaccaacatggccttttccccattcagcatcgccagcctccttacccaggtcctgctcggggctggggagaacaccaaaacaaacctggagagcatcctctcttaccccaaggacttcacctgtgtccaccaggccctgaagggcttcacgaccaaaggtgtcacctcagtctctcagatcttccacagcccagacctggccataagggacacctttgtgaatgcctctcggaccctgtacagcagcagccccagagtcctaagcaacaacagtgacgccaacttggagctcatcaacacctgggtggccaagaacaccaacaacaagatcagccggctgctagacagtctgccctccgatacccgccttgtcctcctcaatgctatctacctgagtgccaagtggaagacaacatttgatcccaagaaaaccagaatggaaccctttcacttcaaaaactcagttataaaagtgcccatgatgaatagcaagaagtaccctgtggcccatttcattgaccaaactttgaaagccaaggtggggcagctgcagctctcccacaatctgagtttggtgatcctggtaccccagaacctgaaacatcgtcttgaagacatggaacaggctctcagcccttctgttttcaaggccatcatggagaaactggagatgtccaagttccagcccactctcctaacactaccccgcatcaaagtgacgaccagccaggatatgctctcaatcatggagaaattggaattcttcgatttttcttatgaccttaacctgtgtgggctgacagaggacccagatcttcaggtttctgcgatgcagcaccagacagtgctggaactgacagagactggggtggaggcggctgcagcctccgccatctctgtggcccgcaccctgctggtctttgaagtgcagcagcccttcctcttcgtgctctgggaccagcagcacaagttccctgtcttcatggggcgagtatatgaccccagggcctgagacctgcaggatcaggttagggcgagcgctacctctccagcctcagctctcagttgcagccctgctgctgcctgcctggacttggcccctgccacctcctgcctcaggtgtccgctatccaccaaaagggctccctgagggtctgggcaagggacctgcttctattagcccttctccatggccctgccatgctctccaaaccactttttgcagctttctctagttcaagttcaccagactctataaataaaacctgacagaccatgactttcaaaaaaaaaaaaaaaaaa

SEQ ID NO: 273 - DNA, 2632 bp, Homo sapiens
  gene (1)..(2632): Accession No. NM_005067
agctgagggacgcgtcagccaggcaccccggggtgtggccagaggacttcggcgacgcttccccgagagtagcccccctcctcaacccagaaaagacaaccccgcggggctgcagcgagccaggcatgctcactggcgcaggcccggcccgcagcccgagcaggaagcgccggcgctaggcggccccctgcgctgccagctggagccgggcggagccagcgccccggcgcagggtggctctgccagtccccgcgcgcctgggcggccgcacacgtgtccaggcgtcacgtccgcgcgcgcccccggggcttgcgtcagcggctgttccagaagcgggtgggccagggctctgcgcaccgctggggttcggggcccgggacgccgccgggaggagggcaccgcgcggggtccgacgcggaggcgtgctcggaacgccgggggctgcggagtgcatcagcgcggtccagccctccgcctgccgggcgccgagcgtctccgccgcccggacctgggctgggcgccgtggcgttgcctcggagctcgctgcccgcggggcgcgcaccgccttgacccgggcggccccgcggcaggcaggcgcccgcagttccatggttggttcggagcgcgatgagccgcccgtcctccaccggccccagcgctaataaaccctgcagcaagcagccgccgccgcagccccagcacactccgtccccggctgcgcccccggccgccgccaccatctcggctgcgggccccggctcgtccgcggtgcccgccgcggcggcggtgatctcgggccccggcggcggcggcggggccggcccggtgtccccgcagcaccacgagctgacctcgctcttcgagtgtccggtctgctttgactatgtcctgcctcctattctgcagtgccaggccgggcacctggtgtgtaaccaatgccgccagaagttgagctgctgcccgacgtgcaggggcgccctgacgcccagcatcaggaacctggctatggagaaggtggcctcggcagtcctgtttccctgtaagtatgccaccacgggctgttccctgaccctgcaccatacggagaaaccagaacatgaagacatatgtgaataccgtccctactcctgcccatgtcctggtgcttcctgcaagtggcaggggtccctggaagctgtgatgtcccatctcatgcacgcccacaagagcattaccacccttcagggagaagacatcgtctttctagctacagacattaacttgccaggggctgtcgactgggtgatgatgcagtcatgttttggccatcacttcatgctggtgctggagaaacaagagaagtacgaaggccaccagcagttttttgccatcgtcctgctcattggcacccgcaagcaagccgagaactttgcctacagactggagttgaatgggaaccggcggagattgacctgggaggccacgccccgttcgattcatgacggtgtggctgcggccatcatgaacagcgactgccttgttttcgacacagccatagcacatctttttgcagataatgggaaccttggaatcaatgttactatttctacatgttgtccatgatgtgactttcgtaaaccttcaaaattatttgggcatagtgctctatgtttaataaaggtttttatagatgttttattccatatgtcttcacaagtcaggacccacaattacccgtgttttgtttgaacagcagtgtcccatctggcttcgacccaacaaagttcattaacctgggatgaatggggttggcctgttggtgatttggatgctgttctgtgatctaaaacaactcttattgaattgtatttactccctaaacaacacttgacaggctgttgcacagggcttctatagatcagtgtgttaggaatgggaggccccttcctgcctgccttcccatattggtcccttgacattgacaaaagcacagtgactgtcagcagattcctttacttttgtttgtgggaggtaggaattgttttaatgcattttaaacagtgtttctgaaattggatggctggctaatagacactgaatcacccggagtgcttatcttaaaattgcagatttagggagcctgccaatttaacagtctcatcaggtgattcttttcaacagtaatgtttgagaattactgggttaaattgtgggaaagggtccagattttaaaggtgctttaaggttgccctctgccgatactgtttgtctttctactgtttcatcccctaacttcccccaaccctcaaattaaaactagaactatagatccacatgaacgcacgcctgagatttggccactcacctatgttttgggtggattgcctaggaaagcaagtcatatggccattgatagttctcatgtaattagttttgctcaccactagtacagatgacccgtttacacgtggcttccctcggaagccctcctcaacagtagctggtgtgaaagactaaatcagtagagttggaaaagctttataaccggtgtgtcatatgcttgctatttaaagctgtgtgttggttttgtttttctgccacattcactagttttttaataaatattttccaaaaatggataaaaaaaaaaaaa

SEQ ID NO: 274 - DNA, 2525 bp, Homo sapiens
  gene (1)..(2525): Accession No. NM_003627
gcttcgcagacctctggcgcccggcgggttcccagttcccccgcttcttccgaggagacagcggaggcgaggccaccgggctgtcaggctgaagctccgtggcggccgggtcctgcacgcagagaagaccccagcgccggcgcggctcagggctgggcccacgggactccggacgcgccgcgaaagcgttgcgctcccggaggcgtccgcagctgctggctgctcatttgccggtgaccggaggctcggggccagcatggcccccacgctgcaacaggcgtaccggaggcgctggtggatggcctgcacggctgtgctggagaacctcttcttctctgctgtactcctgggctggggctccctgttgatcattctgaagaacgagggcttctattccagcacgtgcccagctgagagcagcaccaacaccacccaggatgagcagcgcaggtggccaggctgtgaccagcaggacgagatgctcaacctgggcttcaccattggttccttcgtgctcagcgccaccaccctgccactggggatcctcatggaccgctttggcccccgacccgtgcggctggttggcagtgcctgcttcactgcgtcctgcaccctcatggccctggcctcccgggacgtggaagctctgtctccgttgatattcctggcgctgtccctgaatggctttggtggcatctgcctaacgttcacttcactcacgctgcccaacatgtttgggaacctgcgctccacgttaatggccctcatgattggctcttacgcctcttctgccattacgttcccaggaatcaagctgatctacgatgccggtgtggccttcgtggtcatcatgttcacctggtctggcctggcctgccttatctttctgaactgcaccctcaactggcccatcgaagcctttcctgcccctgaggaagtcaattacacgaagaagatcaagctgagtgggctggccctggaccacaaggtgacaggtgacctcttctacacccatgtgaccaccatgggccagaggctcagccagaaggcccccagcctggaggacggttcggatgccttcatgtcaccccaggatgttcggggcacctcagaaaaccttcctgagaggtctgtccccttacgcaagagcctctgctcccccactttcctgtggagcctcctcaccatgggcatgacccagctgcggatcatcttctacatggctgctgtgaacaagatgctggagtaccttgtgactggtggccaggagcatgagacaaatgaacagcaacaaaaggtggcagagacagttgggttctactcctccgtcttcggggccatgcagctgttgtgccttctcacctgccccctcattggctacatcatggactggcggatcaaggactgcgtggacgccccaactcagggcactgtcctcggagatgccagggacggggttgctaccaaatccatcagaccacgctactgcaagatccaaaagctcaccaatgccatcagtgccttcaccctgaccaacctgctgcttgtgggttttggcatcacctgtctcatcaacaacttacacctccagtttgtgacctttgtcctgcacaccattgttcgaggtttcttccactcagcctgtgggagtctctatgctgcagtgttcccatccaaccactttgggacgctgacaggcctgcagtccctcatcagtgctgtgttcgccttgcttcagcagccacttttcatggcgatggtgggacccctgaaaggagagcccttctgggtgaatctgggcctcctgctattctcactcctgggattcctgttgccttcctacctcttctattaccgtgcccggctccagcaggagtacgccgccaatgggatgggcccactgaaggtgcttagcggctctgaggtgaccgcatagacttctcagaccaagggacctggatgacaggcaatcaaggcctgagcaaccaaaaggagtgccccatatggcttttctacctgtaacatgcacatagagccatggccgtagatttataaataccaagagaagttctatttttgtaaagactgcaaaaaggaggaaaaaaaaccttcaaaaacgccccctaagtcaacgctccattgactgaagacagtccctatcctagaggggttgagctttcttcctccttgggttggaggagaccagggtgcctcttatctccttctagcggtctgcctcctggtacctcttggggggatcggcaaacaggctacccctgaggtcccatgtgccatgagtgtgcacacatgcatgtgtctgtgtatgtgtgaatgtgagagagacacagccctcctttcagaaggaaaggggcctgaggtgccagctgtgtcctgggttaggggttgggggtcggccccttccagggccaggagggcaggttccctctctggtgctgctgcttgcaagtcttagaggaaataaaaagggaagtgagagaaaaaaaaaaaaaaaaaaaaaaaaaaaa

SEQ ID NO: 275 - DNA, 7667 bp, Homo sapiens
  gene (1)..(7667): Accession No. NM_138473
gtccgggttcgcttgcctcgtcagcgtccgcgtttttcccggccccccccaacccccccggacaggacccccttgagcttgtccctcagctgccaccatgagcgaccaagatcactccatggatgaaatgacagctgtggtgaaaattgaaaaaggagttggtggcaataatgggggcaatggtaatggtggtggtgccttttcacaggctcgaagtagcagcacaggcagtagcagcagcactggaggaggagggcaggagtcccagccatcccctttggctctgctggcagcaacttgcagcagaattgagtcacccaatgagaacagcaacaactcccagggcccgagtcagtcagggggaacaggtgagcttgacctcacagccacacaactttcacagggtgccaatggctggcagatcatctcttcctcctctggggctacccctacctcaaaggaacagagtggcagcagtaccaatggcagcaatggcagtgagtcttccaagaatcgcacagtctctggtgggcagtatgttgtggctgccgctcccaacttacagaaccagcaagttctgacaggactacctggagtgatgcctaatattcagtatcaagtaatcccacagttccagaccgttgatgggcaacagctgcagtttgctgccactggggcccaagtgcagcaggatggttctggtcaaatacagatcataccaggtgcaaaccaacagattatcacaaatcgaggaagtggaggcaacatcattgctgctatgccaaacctactccagcaggctgtccccctccaaggcctggctaataatgtactctcaggacagactcagtatgtgaccaatgtaccagtggccctgaatgggaacatcaccttgctacctgtcaacagcgtttctgcagctaccttgactcccagctctcaggcagtcacgatcagcagctctgggtcccaggagagtggctcacagcctgtcacctcagggactaccatcagttctgccagcttggtatcatcacaagccagttccagctcctttttcaccaatgccaatagctactcaactactactaccaccagcaacatgggaattatgaactttactaccagtggatcatcagggaccaactctcaaggccagacaccccagagggtcagtgggctacaggggtctgatgctctgaacatccagcaaaaccagacatctggaggctcattgcaagcaggccagcaaaaagaaggagagcaaaaccagcagacacagcagcaacaaattcttatccagcctcagctagttcaagggggacaggccctccaggccctccaagcagcaccattgtcagggcagacctttacaactcaagccatctcccaggaaaccctccagaacctccagcttcaggctgttccaaactctggtcccatcatcatccggacaccaacagtggggcccaatggacaggtcagttggcagactctacagctgcagaacctccaagttcagaacccacaagcccaaacaatcaccttagccccaatgcagggtgtttccttggggcagaccagcagcagcaacaccactctcacacccattgcctcagctgcttccattcctgctggcacagtcactgtgaatgctgctcaactctcctccatgccaggcctccagaccattaacctcagtgcattgggtacttcaggaatccaggtgcacccaattcaaggcctgccgttggctatagcaaatgccccaggtgatcatggagctcagcttggtctccatggggctggtggtgatggaatacatgatgacacagcaggtggagaggaaggagaaaacagcccagatgcccaaccccaagccggtcggaggacccggcgggaagcatgcacctgcccctactgtaaagacagtgaaggaaggggctcgggggatcctggcaaaaagaaacagcatatttgccacatccaaggctgtgggaaagtgtatggcaagacctctcacctgcgggcacacttgcgctggcatacaggcgagaggccatttatgtgtacctggtcatactgtgggaaacgcttcacacgttcggatgagctacagaggcacaaacgtacacacacaggtgagaagaaatttgcctgccctgagtgtcctaagcgcttcatgaggagtgaccacctgtcaaaacatatcaagacccaccagaataagaagggaggcccaggtgtagctctgagtgtgggcactttgcccctggacagtggggcaggttcagaaggcagtggcactgccactccttcagcccttattaccaccaatatggtagccatggaggccatctgtccagagggcattgcccgtcttgccaacagtggcatcaacgtcatgcaggtggcagatctgcagtccattaatatcagtggcaatggcttctgagatcaggcacccggggccagagacatatgggccataccccttaaccccgggatgcaaggtagcatgggtccaagagacatggaagagagagccatgaagcattaaaatgcatggtgttgagaagaatcaggagagggatacaagagaggagatggggtcccggcacccatctgtatcatcagtgcctctttgaaggtgggaaacattagtgaaaattctgttggtgccacgctttgatgagcatttgtttgaccccagtttcttcttacacttcttaccccagcctacccttcctgcatttctcttctcagctcttccatgatggattcccccccctttcctaaagccatcatgccttgataaatatatatgatcattgaaatactttttaacaaaaaacagattctatattattatatatatatatatatatataaagatatatagagatgcattcacaggggttggctgggaggaggaagaccattctgtgaccaaaataccttggtcattttttttatattgccttatttccctatggctgagccttgttgtgacacatcaagcttttctgtagatgttgtcttggcttcccaccagcttaagcgttcatatgctctgcttttagttcatatatacatacataatgtttttcctttcttaattttgtctttttgtttgggatcagcttcttgcactccttccctaactcaactgttgccgtctcatcttctctcatctgatcacttcatgttttgtttttgttactgcctggatgaggcacttctgtcaattttttcaggaccttagttccagcagcagaatggaaaaatccttgaagcccaggctgatgcttgaagtaactgtggagggagtgttcaaaatactactgacgcaggcaccttcttggcgctggagagtcaaaggcatctcccttcattagctgctctgagcatcaagaattagaagtctttcagtggaattgtacaagagtccctttgaagataataatcttggctcagtttgtataaactgtcaaattttcaaataataggtagggggctttcactaggaaaatcatgtgctcagaagaggaaatgactcgtagtcaggttcaggagttagtggagtatttggactttggtactgctgtcttccaaggtagctctaagttttgatgtgtgggcttctgagtttatattctgaaaggaaatacacttcttttgaacatccccactaggttcttttccattgtcaataaggagcatcagccagtgaatctgtttcaggtttccattctgcagaactcctccaaagcatgtgctagtggcaagacagtggttcttatgatgttttcccttaacttttccttgtatgttcttgggtggttcctaagggaaagggaagcacatgatcatgggaatgatagcccagaacaaaaagaaatcttgtcttaccacagtgttttataggagagattgggagaaatcatcctgttttctctgtgacctgatttcagaagagactgatccaaaaattataacggcagggaacctagtgcatttggcactgagatttaaatgcaaccagaattgtcctcaaggcccagccataaaagcattgtctctctcgaccttctggtatcttgttagagagcttttcactgtgaggaagtgtggaaaaatagctctgtgtgtgtgtgtgtgtgtgtgtgtgtgtgtgtgtgtaatctgttaggttggggataggttttctgctagccaatattaaaagagacctgcaataaaaaaattaccctgatctgatagaaagcaagtgtttttgtatgtgtgggtgaatgtgtgttcatgcccgtatatgtctacacacagatgacaaattatatttgaaatcgttggaaaataaattcagatcaaaatgcctttcaggcccattacctagaaatctatcttaaaacctgggtatgttcctaaggtcatttctttgcttatgctaaattaattacaattatgaatggaggatattctactgtacttttttaaaaagaaactatttttgtgtttgaaagtgaaaccaacatccagatctatagcagagtccttattcttctcataaatctttttactttggctacaaatagatgatggtatgattctattatatattttatataaaatccatccaaattaagttttgggtaagtgtgttgtttaatctgaactatagtaacttaatactctaaacaatagttcactccatttggtcctttctccacagatgtaattatgttttcaactcaggaactatggcaaggaactttccccagatcaaattctattaacgctgagatacaagtcatccatgcacagccactatcataccctttattctcactgaaaggcagaactcagaacctgttattttatgtctgtaatcatgtactttggcatcttttggaggaaaggggcaggataactcactggaatgtacagtattttgctagtgcatttcaaggaatggaatcttctccagtatgaaattaccagatataaaataatgtaatgatgctgaggatataagcttttagaaggtaatttgatggtatttctttctcgaatgaaaagctgctggtttaccctcaaccctattcattagcattaccatgagtgaatttatatctaattatttccacttgccctgttctcttcacaccaaggaagctccagatccagtatcttgtttggcctcaaaacagaagcagcttcttttgtctcccagcagtagtgagccactcagtctcttccacaggaagtttggagcctacattccttgagtcaggagcttattacagaaaaaccccgtttccctgaacttttggctaacagaaattaatttaactgacatgcatattgattctgaaatttttttcctaagtttttttcatttttttgaatgagttttttaaattttttagatgaccaaaacttgcagggcaggggatgcccagaagagtggtgagatagtaaaacacttattccctcatcctttcaggttttcaggttgcccatttatattcatttacatgtcatttgactgtctcactttttacccagaacagtaacaacccacaccgtcttccttcagggatttccaactggcactctgtgggtgctacacagaatgcaatttaatggatatttctcagcctggttcagaataaattgatcctttgatcccagaaagtatatactgaagtgtgggataaagattatgattaggggagggttggagacaaaagctgtaaattactatggctgatttatttctactatatacatatatattttttgcttttgtatatcctatataggaaactaagcattgtattttttttaacaaatctaaaaaagcactatgaactacaggtgtttgactttcaaaatatattttgtattgttaatatcttcacattgtgtgaatactggaagctgcagatctttgctaggacgcaataaatttatatactttttgaggggttcttctggggtgctaatcaggcccctgttatgcttagggggagccctggtgctacttgcttgaagttttcagtgtaagtaccctgatgccttttggaccttgggatcagatcaagagttttggagatcaggtaccaaggaaataaggacagtctagctgcctcaagtgaggggccctttgcatagctctccttccccctcactgaagctgggtagcctattggggttgagagggaaaatgtgaaatctcagaatttatctcccttagaagagagccagtaacttatgtacaaggatgaaagaaaggtcgcagcagtagctttggggaaagggaggaagatatggcacttctccaaccccggaaaacattgcttttgaaaactgctgataaaatatgagccggttattacttctgtttgggagactgtgctctctgtggtgcctctcttggctctactccacagataccagacctcttctaagaggatgagcagaccagctttgaggttgacctgtttctctttgtctgccttcccaaaacaccagcccccaggaagacattaagcagccttaagcttaaattcctactccctcttccaaatttggctcacttgccttagatccaaggcagggaaaggaaaagaaggggggtctctggctttattactcccctaagtctttactctgacttccccaaacccagaaagattttctccacagtgttcatttgaaagaggagtattttgtcccattttccccttcctcattatcaaacagccccagtcttccttgtctctgctaagaaagtagaggcatgatgatctgcctctcaactgccctaagtcctagctaagtatcaggggaaaaaaaaaaaaaaaaagcctaacaaatgggattagactagggctgcaagtagtgaggattttgttgatacctctgctgggatgtgtgctttcccatatcttgccttcaggaattacactgtgccttttccccagggatatgggctctgtctacccagtgctccagtttcccggtaactgctcttgaacattgtggacaagggcaggtcttcatatttttgatcatccctttctcccagtgaaatcccatagcccttacctagagtctagggcacaaagacttcggggaagatacactgagattgacctgaggagacatctacacacaccagtggcagctgccccagggcctgcttccccttcctaagtctgtcatcctctggaagggatgggtggtgctccaatctctggtgcctaaaaacccaagtttatttctctcttaacactggcaataaccagtccacaccactgttgccttttaaaacctcttaataatctcatgctgtgtttgttttgattccaatccaattatcaccagggctgtgtgggtaaatgcttttaaatgctctctcatcttgttcttccccctcaccccccactcttaggtatgtatgatgctaatcttgtccctaagtaagtttcttcctgctccttttgtatcttcctttcttgtctttcctcctaccttttgtctcttggtgttttgggacttttttttttttttttttggccttttgtacaaagattagtttcaatgtagtctgtagcctcctttgtaaaccaattaaaaagttttttaataaaaaaaaaaaa

SEQ ID NO: 276 - DNA, 3178 bp, Homo sapiens
  gene (1)..(3178): Accession No. NM_003118
gttgcctgtctctaaacccctccacattcccgcggtccttcagactgcccggagagcgcgctctgcctgccgcctgcctgcctgccactgagggttcccagcaccatgagggcctggatcttctttctcctttgcctggccgggagggccttggcagcccctcagcaagaagccctgcctgatgagacagaggtggtggaagaaactgtggcagaggtgactgaggtatctgtgggagctaatcctgtccaggtggaagtaggagaatttgatgatggtgcagaggaaaccgaagaggaggtggtggcggaaaatccctgccagaaccaccactgcaaacacggcaaggtgtgcgagctggatgagaacaacacccccatgtgcgtgtgccaggaccccaccagctgcccagcccccattggcgagtttgagaaggtgtgcagcaatgacaacaagaccttcgactcttcctgccacttctttgccacaaagtgcaccctggagggcaccaagaagggccacaagctccacctggactacatcgggccttgcaaatacatccccccttgcctggactctgagctgaccgaattccccctgcgcatgcgggactggctcaagaacgtcctggtcaccctgtatgagagggatgaggacaacaaccttctgactgagaagcagaagctgcgggtgaagaagatccatgagaatgagaagcgcctggaggcaggagaccaccccgtggagctgctggcccgggacttcgagaagaactataacatgtacatcttccctgtacactggcagttcggccagctggaccagcaccccattgacgggtacctctcccacaccgagctggctccactgcgtgctcccctcatccccatggagcattgcaccacccgctttttcgagacctgtgacctggacaatgacaagtacatcgccctggatgagtgggccggctgcttcggcatcaagcagaaggatatcgacaaggatcttgtgatctaaatccactccttccacagtaccggattctctctttaaccctccccttcgtgtttcccccaatgtttaaaatgtttggatggtttgttgttctgcctggagacaaggtgctaacatagatttaagtgaatacattaacggtgctaaaaatgaaaattctaacccaagacatgacattcttagctgtaacttaactattaaggccttttccacacgcattaatagtcccatttttctcttgccatttgtagctttgcccattgtcttattggcacatgggtggacacggatctgctgggctctgccttaaacacacattgcagcttcaacttttctctttagtgttctgtttgaaactaatacttaccgagtcagactttgtgttcatttcatttcagggtcttggctgcctgtgggcttccccaggtggcctggaggtgggcaaagggaagtaacagacacacgatgttgtcaaggatggttttgggactagaggctcagtggtgggagagatccctgcagaacccaccaaccagaacgtggtttgcctgaggctgtaactgagagaaagattctggggctgtgttatgaaaatatagacattctcacataagcccagttcatcaccatttcctcctttacctttcagtgcagtttcttttcacattaggctgttggttcaaacttttgggagcacggactgtcagttctctgggaagtggtcagcgcatcctgcagggcttctcctcctctgtcttttggagaaccagggctcttctcaggggctctagggactgccaggctgtttcagccaggaaggccaaaatcaagagtgagatgtagaaagttgtaaaatagaaaaagtggagttggtgaatcggttgttctttcctcacatttggatgattgtcataaggtttttagcatgttcctccttttcttcaccctccccttttttcttctattaatcaagagaaacttcaaagttaatgggatggtcggatctcacaggctgagaactcgttcacctccaagcatttcatgaaaaagctgcttcttattaatcatacaaactctcaccatgatgtgaagagtttcacaaatccttcaaaataaaaagtaatgacttagaaactgccttcctgggtgatttgcatgtgtcttagtcttagtcaccttattatcctgacacaaaaacacatgagcatacatgtctacacatgactacacaaatgcaaacctttgcaaacacattatgcttttgcacacacacacctgtacacacacaccggcatgtttatacacagggagtgtatggttcctgtaagcactaagttagctgttttcatttaatgacctgtggtttaacccttttgatcactaccaccattatcagcaccagactgagcagctatatccttttattaatcatggtcattcattcattcattcattcacaaaatatttatgatgtatttactctgcaccaggtcccatgccaagcactggggacacagttatggcaaagtagacaaagcatttgttcatttggagcttagagtccaggaggaatacattagataatgacacaatcaaatataaattgcaagatgtcacaggtgtgatgaagggagagtaggagagaccatgagtatgtgtaacaggaggacacagcattattctagtgctgtactgttccgtacggcagccactacccacatgtaactttttaagatttaaatttaaattagttaacattcaaaacgcagctccccaatcacactagcaacatttcaagtgcttgagagccatgcatgattagtggttaccctattgaataggtcagaagtagaatcttttcatcatcacagaaagttctattggacagtgctcttctagatcatcataagactacagagcacttttcaaagctcatgcatgttcatcatgttagtgtcgtattttgagctggggttttgagactccccttagagatagagaaacagacccaagaaatgtgctcaattgcaatgggccacatacctagatctccagatgtcatttcccctctcttattttaagttatgttaagattactaaaacaataaaagctcctaaaaaatcaaaaaaaaaaaaaaaaaaaaaaaaaaaaaaaaaaaaaaaa

SEQ ID NO: 277 - DNA, 4343 bp, Homo sapiens
  gene (1)..(4343): Accession No. NM_003131
aatggggagcggaggtgccggaaccacggaccaatggggcgggggcgctggggctcaccatataaggagcggcctcgccataaaaggaaacattgtatctctttatatggggggaagggtcgggggatccctccgccgccagcgcgtggtcccggccccctccacccgccgtctcggccgcggccagcagcccctgccccccgggggacgctgacggccgcccggcgcgccgccctagcagacggacagggggcgctgcgcgcggcctggggcaacccgggccacaggggcaggaaagtgagggcccaggtcggcccgggcgtgcaggggccccgggttcgcagcggcggccgcggcagcgatagcggcactagcagcagcgggagtgccgggttgagccgggaagccgatggcggcggctgcggcggctccgattcctcgctgactgcccgtccgccctcctgcatcgagcgccatgttaccgacccaagctggggccgcggcggctctgggccggggctcggccctggggggcagcctgaaccggaccccgacggggcggccgggcggcggcggcgggacacgcggggctaacgggggccgggtccccgggaatggcgcggggctcgggcccggccgcctggagcgggaggctgcggcagcggcggcaaccaccccggcgcccaccgcgggggccctctacagcggcagcgagggcgactcggagtcgggcgaggaggaggagctgggcgccgagcggcgcggcctgaagcggagcctgagcgagatggagatcggtatggtggtcggtgggcccgaggcgtcggcagcggccaccgggggctacgggccggtgagcggcgcggtgagcggggccaagccgggtaagaagacccggggccgcgtgaagatcaagatggagttcatcgacaacaagctgcggcgctacacgaccttcagcaagaggaagacgggcatcatgaagaaggcctatgagctgtccacgctgacagggacacaggtgctgttgctggtggccagtgagacaggccatgtgtatacctttgccacccgaaaactgcagcccatgatcaccagtgagaccggcaaggcactgattcagacctgcctcaactcgccagactctccaccccgttcagaccccacaacagaccagagaatgagtgccactggctttgaagagacagatctcacctaccaggtgtcggagtctgacagcagtggggagaccaaggacacactgaagccggcgttcacagtcaccaacctgccgggtacaacctccaccatccaaacagcacctagcacctctaccaccatgcaagtcagcagcggcccctcctttcccatcaccaactacctggcaccagtgtctgctagtgtcagccccagtgctgtcagcagtgccaatgggactgtgctgaagagtacaggcagcggccctgtctcctctgggggccttatgcagctgcctaccagcttcaccctcatgcctggtggggcagtggcccagcaggtcccagtgcaggccattcaagtgcaccaggccccacagcaagcgtctccctcccgtgacagcagcacagacctcacgcagacctcctccagcgggacagtgacgctgcccgccaccatcatgacgtcatccgtgcccacaactgtgggtggccacatgatgtaccctagcccgcatgcggtgatgtatgcccccacctcgggcctgggtgatggcagcctcaccgtgctgaatgccttctcccaggcaccatccaccatgcaggtgtcacacagccaggtccaggagccaggtggcgtcccccaggtgttcctgacagcatcatctgggacagtgcagatccctgtttcagcagttcagctccaccagatggctgtgatagggcagcaggccgggagcagcagcaacctcaccgagctacaggtggtgaacctggacaccgcccacagcaccaagagtgaatgatccgcccgccgccctggacagatggcccaagggatggcaccacttatttattgttgccttttcacgttttctttacacacacgttgacgggccgcaggagggaggcggggaggaggaacgggcagccacaggactgagccctctcactccagccaaagaaatgggcctgcctgcctccacccgtcctccctcagcctccccttcttcccgccccacctcccatttctgttgctggaggggctgtcctccttcctgggaccccctcgccagcttggctcgatgtttgccatgagtattagcttacccaatgggaccgtgccccacctccccacacacaggccttctgtggggctgggcaccgtgtcctcctctgaggaagcagttggggccctcttgccagcctccttgctgaccccaggtcagccctgtgtctgtcacaggctgggtcaaaagagccctggctctgcccctcagggggccagctggggagatgggggcttcttcctcacactgctgtcctctcccccttcagctcctgagtagctgggcctgtgcactgggcaggttcctggggccgcctgccctgccttgccgctccccttggacctccaggggctcctgggttggagggaaccaccagcgttcccttctcccccttgtcttcccccctctcctcccagctgctttacttaaagttgattttgaactttttatttgaggagacgaagtgaaaacaaatctataaatatatatttttaaaatatttaacttttttttatggcgtttttctcgtccccctccctgcccaaactccccttccctggggagccctcaggctccccagaactggctgggcccctggggacagagccaccccatgagctcggggtccaccagtgtgtgggggagattctgggtttgcccagtcctgggttgtttccaggagaaagccgggggaggggccctcaggccattccccaacggggtggggagggtgacccacagctctgggcctctttttgccctttagggctgttgctagggagagggaagagggagaccaaatgtcggggttggggtgggagggcgtcaggcagaggcaactgacttcatttgtgccacacgcatgggcattgcagccttgcgctgtcccaggcatgcagctgcctggggcccaagttgcagtgagcagggtggggtctgggagggggtgagaggcaggaatgggggtcagaagaagtgggagcagcttcttgggctgagtgcagccaaaggggagccagaaatgggcagttctcccagggagtgagcagctactgtaacttttttaaattaagacaaaaagccttgaagaaaatgactttatttttctaagtgtaacctcagtatttatgtaatttgtacaggggccatgccccacccccctcctccccctttggggtagaccttgagggtgggccagcataggggggagggtcttttaccctgtgtcagagcctaccttcaccacctatatccagaaggggagctttttcagaaacagggcagcagtggggtgaaattttcttaacccctaagactgccttcagtaggaacaagctggcttctgtgattaggtgaagggatgggggaagattttatgcacagcctagttatcaaggggatgatttgccgacatgtttgagaaccccctaacctctaaccctcattgctgtcttgccccagtttggggtgccaagatggaagtcacctttctgggctttctcctggagatagctggggcttatgggtggctttcaaggctggggcatggcaaatcaggggccagagagcaggggagcttgggactcaggtctgtaactgcccagccccttttctctgctcttgtttcactccaccatcactcactcactccccactcccccacccatggggaggagacctttgatgaattcttcctctccttcccacaaaagacagacccagtgagtgaatcaggcaaagtgcttataatgtgtgttgtgtgagcgtggccttgggaggacatgcgtgtgtcagggatgagttgaggtgatatttttatgtgcagcgacccttggtgtttcccttcctcggtggctctggggtatgtgtgtgtgggtgtgtgcgcctgagtgagtgtgtgtgcttgaatgtgagtgtgtatgtcagtggtttctacttcccctgggatgctgacccaggaatagtggacatggtcacagtcctatgtacagagctttcttttgtattaaaaaaaaatactctttcaataaatgtatcatttttgtgcacagaaaaaaaaaaaaaaaaaaaaaaaaaa

SEQ ID NO: 278 - DNA, 3319 bp, Homo sapiens
  gene (1)..(3319): Accession No. NM_021978
agcggagctgcagccggagaaagaggaagagggagagagagcgcgccagggcgagggcaccgccgccggtcgggcgcgctgggcctgcccggaatcccgccgcctgcgccccgcgccccgcgccctgcgggccatgggagccggccgccggcagggacgacgcctgtgagacccgcgagcggcctcggggaccatggggagcgatcgggcccgcaagggcggagggggcccgaaggacttcggcgcgggactcaagtacaactcccggcacgagaaagtgaatggcttggaggaaggcgtggagttcctgccagtcaacaacgtcaagaaggtggaaaagcatggcccggggcgctgggtggtgctggcagccgtgctgatcggcctcctcttggtcttgctggggatcggcttcctggtgtggcatttgcagtaccgggacgtgcgtgtccagaaggtcttcaatggctacatgaggatcacaaatgagaattttgtggatgcctacgagaactccaactccactgagtttgtaagcctggccagcaaggtgaaggacgcgctgaagctgctgtacagcggagtcccattcctgggcccctaccacaaggagtcggctgtgacggccttcagcgagggcagcgtcatcgcctactactggtctgagttcagcatcccgcagcacctggtggaggaggccgagcgcgtcatggccgaggagcgcgtagtcatgctgcccccgcgggcgcgctccctgaagtcctttgtggtcacctcagtggtggctttccccacggactccaaaacagtacagaggacccaggacaacagctgcagctttggcctgcacgcccgcggtgtggagctgatgcgcttcaccacgcccggcttccctgacagcccctaccccgctcatgcccgctgccagtgggccctgcggggggacgccgactcagtgctgagcctcaccttccgcagctttgaccttgcgtcctgcgacgagcgcggcagcgacctggtgacggtgtacaacaccctgagccccatggagccccacgccctggtgcagttgtgtggcacctaccctccctcctacaacctgaccttccactcctcccagaacgtcctgctcatcacactgataaccaacactgagcggcggcatcccggctttgaggccaccttcttccagctgcctaggatgagcagctgtggaggccgcttacgtaaagcccaggggacattcaacagcccctactacccaggccactacccacccaacattgactgcacatggaacattgaggtgcccaacaaccagcatgtgaaggtgcgcttcaaattcttctacctgctggagcccggcgtgcctgcgggcacctgccccaaggactacgtggagatcaacggggagaaatactgcggagagaggtcccagttcgtcgtcaccagcaacagcaacaagatcacagttcgcttccactcagatcagtcctacaccgacaccggcttcttagctgaatacctctcctacgactccagtgacccatgcccggggcagttcacgtgccgcacggggcggtgtatccggaaggagctgcgctgtgatggctgggccgactgcaccgaccacagcgatgagctcaactgcagttgcgacgccggccaccagttcacgtgcaagaacaagttctgcaagcccctcttctgggtctgcgacagtgtgaacgactgcggagacaacagcgacgagcaggggtgcagttgtccggcccagaccttcaggtgttccaatgggaagtgcctctcgaaaagccagcagtgcaatgggaaggacgactgtggggacgggtccgacgaggcctcctgccccaaggtgaacgtcgtcacttgtaccaaacacacctaccgctgcctcaatgggctctgcttgagcaagggcaaccctgagtgtgacgggaaggaggactgtagcgacggctcagatgagaaggactgcgactgtgggctgcggtcattcacgagacaggctcgtgttgttgggggcacggatgcggatgagggcgagtggccctggcaggtaagcctgcatgctctgggccagggccacatctgcggtgcttccctcatctctcccaactggctggtctctgccgcacactgctacatcgatgacagaggattcaggtactcagaccccacgcagtggacggccttcctgggcttgcacgaccagagccagcgcagcgcccctggggtgcaggagcgcaggctcaagcgcatcatctcccaccccttcttcaatgacttcaccttcgactatgacatcgcgctgctggagctggagaaaccggcagagtacagctccatggtgcggcccatctgcctgccggacgcctcccatgtcttccctgccggcaaggccatctgggtcacgggctggggacacacccagtatggaggcactggcgcgctgatcctgcaaaagggtgagatccgcgtcatcaaccagaccacctgcgagaacctcctgccgcagcagatcacgccgcgcatgatgtgcgtgggcttcctcagcggcggcgtggactcctgccagggtgattccgggggacccctgtccagcgtggaggcggatgggcggatcttccaggccggtgtggtgagctggggagacggctgcgctcagaggaacaagccaggcgtgtacacaaggctccctctgtttcgggactggatcaaagagaacactggggtataggggccggggccacccaaatgtgtacacctgcggggccacccatcgtccaccccagtgtgcacgcctgcaggctggagactggaccgctgactgcaccagcgcccccagaacatacactgtgaactcaatctccagggctccaaatctgcctagaaaacctctcgcttcctcagcctccaaagtggagctgggaggtagaaggggaggacactggtggttctactgacccaactgggggcaaaggtttgaagacacagcctcccccgccagccccaagctgggccgaggcgcgtttgtgcatatctgcctcccctgtctctaaggagcagcgggaacggagcttcggggcctcctcagtgaaggtggtggggctgccggatctgggctgtggggcccttgggccacgctcttgaggaagcccaggctcggaggaccctggaaaacagacgggtctgagactgaaattgttttaccagctcccagggtggacttcagtgtgtgtatttgtgtaaatgagtaaaacattttatttctttttaaaaaaaaaaaaaaaaaaaa

SEQ ID NO: 279 - DNA, 2885 bp, Homo sapiens
  gene (1)..(2885): Accession No. NM_003217
gagaggcgaacgccgggtaaaagatcgggagcggaagtgggcgagtcagagcacatccggtgttagaagcgctggtaggccttggagaggcgggttaggaagagtggagactgctgcacggactctggaaccatgaacatatttgatcgaaagatcaactttgatgcgcttttaaaattttctcatataaccccgtcaacgcagcagcacctgaagaaggtctatgcaagttttgccctttgtatgtttgtggcggctgcaggggcctatgtccatatggtcactcatttcattcaggctggcctgctgtctgccttgggctccctgatattgatgatttggctgatggcaacacctcatagccatgaaactgaacagaaaagactgggacttcttgctggatttgcattccttacaggagttggcctgggccctgccctggagttttgtattgctgtcaaccccagcatccttcccactgctttcatgggcacggcaatgatctttacctgcttcaccctcagtgcactctatgccaggcgccgtagctacctctttctgggaggtatcttgatgtcagccctgagcttgttgcttttgtcttccctggggaatgttttctttggatccatttggcttttccaggcaaacctgtatgtgggactggtggtcatgtgtggcttcgtcctttttgatactcaactcattattgaaaaggccgaacatggagatcaagattatatctggcactgcattgatctcttcttagatttcattactgtcttcagaaaactcatgatgatcctggccatgaatgaaaaggataagaagaaagagaagaaatgaagtgaccatccagcctttcccaattagacttcctctccttccacccctcatttcctttttgcacacattacaggtggtgtgttctgtgataatgaaaagcatcagaaaagcttttgtactttgtggtttcctctattttgaattttttgatcaaaaaactgattagcagaatatagtttggagtttggcttcatcttcctggggttcccctcactcccttttttgtcaaccccatctgtagcctcttcctctactcaggcagtcgacccgccacgatgagaagtgggaccagcagagggcgccaacttcaggagtccgctttcccaccaggcttcattcacccagtggacctgaactgtttggtagagccacccggcccttccttcctcattgttgtttggtatgcgcacagttcctgtgggactgggccgtgagttttccattggaaagaagttcagtggtcccattgttaactcagcctcaaatctcaactgtcaggccctacaaagaaaatggagagcctcttctggtggatgctttgctccctctgagctgcccatgctggtctggcaaacacacctttctgctttgccttcacaaaagtaatgtgttccctttcccaccccttgcctgaccctcagggagtcagcctgcttccatccatgggtgggaagacttcagcacaaaggaaagactaattcttgtcaggcatttttgaaaaggctgattatgtgtatcaaggtacagcatcgtagggttcccctaaacttgccctgtttttgtttttttagtttgttatccccttactgagcggcctctactaggtggctgtgattaaatgtcccaagcaaggatagggaaggggaatggttgagcctctggagatcattgtaaccaatcctgccagacctgtttggggcagtggggagcaaacctagataaggacctgtttggggcagcagggagcaaaatctcctttaacaaccaagcagttcctcattcacatcaacagagcgaggctgtgataacttaggaggcagcaatcctaatagtccttcagtgcattttagtctgtctccaactggacaccagtaggtagtgtcaagccagagattcggggcagtagataaatgttcattttactgatgcactttagtttttggtctgttacctgttttccagaaatttgtggccttttaggcgggagttaggcgaccaaaccagtgagagccccaatccctgcagttttgtggcttcaagtgtgggtggacagtcctaatggggatctccagctccttcctgtgggctgccacagacagctacccccagaagggtcaatgttgggagtggttgtggctctgagctgctctacagagcttcagtgtgagaggatcgagccattgaaagctcattaccagtaggacataatttttggctctccctattcacaaccagtgcacagtttgacacagtggcctcaggttcacagtgcaccatgtcactgtgctatcctacgaaatcatttgtttctaagttgtgtttattcctggagtgacatgccaccccgaatggctcactttcactgaggatgctgtcctctgatttagctgctgcctccagcctctggcttgagaacttactaaaggcacttccttcctgttaaacccctgttaactctccataaatttggtgattctctgctaggcctaagattttgagttaacatctcttgaagccaaactccaccttctgtgctttttgcttgggataatggagtttttctttagaaacagtgccaagaatgacaagatattaaaaaaaaaaaagaaagaaaaaaaaaaaaacacctacttttaaagaaaatacctaacagatttttaatatagttatctctaccactttcttttctagtttcttgattttcagctcaggctgcattctaactcatactgtgaagacaaaggtgtttttgattcagaaatatatgaaatctgcatagtcttaatttgtaaaaaataaagaaaattccttaaccttta

SEQ ID NO: 280 - DNA, 823 bp, Homo sapiens
  gene (1)..(823): Accession No. NM_007019
aaacgcgggcgggcgggcccgcagtcctgcagttgcagtcgtgttctccgagttcctgtctctctgccaacgccgcccggatggcttcccaaaaccgcgacccagccgccactagcgtcgccgccgcccgtaaaggagctgagccgagcgggggcgccgcccggggtccggtgggcaaaaggctacagcaggagctgatgaccctcatgatgtctggcgataaagggatttctgccttccctgaatcagacaaccttttcaaatgggtagggaccatccatggagcagctggaacagtatatgaagacctgaggtataagctctcgctagagttccccagtggctacccttacaatgcgcccacagtgaagttcctcacgccctgctatcaccccaacgtggacacccagggtaacatatgcctggacatcctgaaggaaaagtggtctgccctgtatgatgtcaggaccattctgctctccatccagagccttctaggagaacccaacattgatagtcccttgaacacacatgctgccgagctctggaaaaaccccacagcttttaagaagtacctgcaagaaacctactcaaagcaggtcaccagccaggagccctgacccaggctgcccagcctgtccttgtgtcgtctttttaatttttccttagatggtctgtcctttttgtgatttctgtataggactctttatcttgagctgtggtatttttgttttgtttttgtcttttaaattaagcctcggttgagcccttgtatattaaataaatgcatttttgtccttttttagacaaaaaaaaaaaaaaa

SEQ ID NO: 281 - DNA, 5412 bp, Homo sapiens
  gene (1)..(5412): Accession No. NM_003470
gtacgtgcgcgtctccctgccgccgccgccgcccgccgcgggccgccccggggccgccgtcgccgacgacgcgcgggaggaggaggaggaggccgccccgccgccgccgccgccgccgccgccccggctcgccgccgcccgcccgccgggctcgcagccccggcccccggccgcaggcgaggcccaggccgcggccgacatgaaccaccagcagcagcagcagcagcagaaagcgggcgagcagcagttgagcgagcccgaggacatggagatggaagcgggagatacagatgacccaccaagaattactcagaaccctgtgatcaatgggaatgtggccctgagtgatggacacaacaccgcggaggaggacatggaggatgacaccagttggcgctccgaggcaacctttcagttcactgtggagcgcttcagcagactgagtgagtcggtccttagccctccgtgttttgtgcgaaatctgccatggaagattatggtgatgccacgcttttatccagacagaccacaccaaaaaagcgtaggattctttctccagtgcaatgctgaatctgattccacgtcatggtcttgccatgcacaagcagtgctgaagataataaattacagagatgatgaaaagtcgttcagtcgtcgtattagtcatttgttcttccataaagaaaatgattggggattttccaattttatggcctggagtgaagtgaccgatcctgagaaaggatttatagatgatgacaaagttacctttgaagtctttgtacaggcggatgctccccatggagttgcgtgggattcaaagaagcacacaggctacgtcggcttaaagaatcagggagcgacttgttacatgaacagcctgctacagacgttatttttcacgaatcagctacgaaaggctgtgtacatgatgccaaccgagggggatgattcgtctaaaagcgtccctttagcattacaaagagtgttctatgaattacagcatagtgataaacctgtaggaacaaaaaagttaacaaagtcatttgggtgggaaactttagatagcttcatgcaacatgatgttcaggagctttgtcgagtgttgctcgataatgtggaaaataagatgaaaggcacctgtgtagagggcaccatacccaaattattccgcggcaaaatggtgtcctatatccagtgtaaagaagtagactatcggtctgatagaagagaagattattatgatatccagctaagtatcaaaggaaagaaaaatatatttgaatcatttgtggattatgtggcagtagaacagctcgatggggacaataaatacgacgctggggaacatggcttacaggaagcagagaaaggtgtgaaattcctaacattgccaccagtgttacatctacaactgatgagatttatgtatgaccctcagacggaccaaaatatcaagatcaatgataggtttgaattcccagagcagttaccacttgatgaatttttgcaaaaaacagatcctaaggaccctgcaaattatattcttcatgcagtcctggttcatagtggagataatcatggtggacattatgtggtttatctaaaccccaaaggggatggcaaatggtgtaaatttgatgacgacgtggtgtcaaggtgtactaaagaggaagcaattgagcacaattatgggggtcacgatgacgacctgtctgttcgacactgcactaatgcttacatgttagtctacatcagggaatcaaaactgagtgaagttttacaggcggtcaccgaccatgatattcctcagcagttggtggagcgattacaagaagagaaaaggatcgaggctcagaagcggaaggagcggcaggaagcccatctctatatgcaagtgcagatagtcgcagaggaccagttttgtggccaccaagggaatgacatgtacgatgaagaaaaagtgaaatacactgtgttcaaagtattgaagaactcctcgcttgctgagtttgttcagagcctctctcagaccatgggatttccacaagatcaaattcgattgtggcccatgcaagcaaggagtaatggaacaaaacgaccagcaatgttagataatgaagccgacggcaataaaacaatgattgagctcagtgataatgaaaacccttggacaatattcctggaaacagttgatcccgagctggctgctagtggagcgaccttacccaagtttgataaagatcatgatgtaatgttatttttgaagatgtatgatcccaaaacgcggagcttgaattactgtgggcatatctacacaccaatatcctgtaaaatacgtgacttgctcccagttatgtgtgacagagcaggatttattcaagatactagccttatcctctatgaggaagttaaaccgaatttaacagagagaattcaggactatgacgtgtctcttgataaagcccttgatgaactaatggatggtgacatcatagtatttcagaaggatgaccctgaaaatgataacagtgaattacccaccgcaaaggagtatttccgagatctctaccaccgcgttgatgtcattttctgtgataaaacaatccctaatgatcctggatttgtggttacgttatcaaatagaatgaattattttcaggttgcaaagacagttgcacagaggctcaacacagatccaatgttgctgcagtttttcaagtctcaaggttatagggatggcccaggtaatcctcttagacataattatgaaggtactttaagagatcttctacagttcttcaagcctagacaacctaagaaactttactatcagcagcttaagatgaaaatcacagactttgagaacaggcgaagttttaaatgtatatggttaaacagccaatttagggaagaggaaataacactatatccagacaagcatgggtgtgtccgggacctgttagaagaatgtaaaaaggccgtggagcttggggagaaagcatcagggaaacttaggctgctagaaattgtaagctacaaaatcattggtgttcatcaagaagatgaactattagaatgtttatctcctgcaacgagccggacgtttcgaatagaggaaatccctttggaccaggtggacatagacaaagagaatgagatgcttgtcacagtggcgcatttccacaaagaggtcttcggaacgttcggaatcccgtttttgctgaggatacaccagggcgagcattttcgagaagtgatgaagcgaatccagagcctgctggacatccaggagaaggagtttgagaagtttaaatttgcaattgtaatgatgggccgacaccagtacataaatgaagacgagtatgaagtaaatttgaaagactttgagccacagcccggtaatatgtctcatcctcggccttggctagggctcgaccacttcaacaaagccccaaagaggagtcgctacacttaccttgaaaaggccattaaaatccataactgatttccaagctggtgtgttcaaggcgaggacggtgtgtgggtggccccttaacagcctagaactttggtgcacgtgccctctagccgaagtcttcagcaagaggattcgctgctggtgttaattttattttattgaggctgttcagtttggcttctctgtatctattgactgccctttttgagcaaaatgaagatgtttttataaagcttggatgccaatgagagttattttatggtaaccacagtgcaaggcaactgtcagcgcaatgggggagaagaggttagtggatcgggggtccctggctcaaggtctctgggctgtccctagtgggcacgagtggctcggctgccttcctggggtcccgtgcaccagccctgcagctagcaagtcttgtgtttaggctcgtctgacctatttccttcagttatactttcaatgaccttttgtgcatctgttaaggcaaaacagagaaactcacaacctaataaatagcgctcttcccttcattgtgtgcattgtcggcccttcctcgggttctcctcctccagctgcctgggggctttttaataaacttgtctcacctcgtcagccactactgtctgcagcccctttgcaaagtggatgcactgaatacagtccggacagacattgtgggggtctttttattaaatcaagaacattgttaaattcaattaaggtttactctgctgccttggcagacttacgatctcaacagttcatacgagcaggtgaaaggattataaatagaatttcgttaaagtggaacagacgacaagaaagccttttagcaagagggcatgctcactagtggttagtaagctgtcgactttgtaaaaaagttaaaaatgaaaaaaaaaggaaaaatgaattgtatatttaatgaatgaacatgtacaatttgccactgggaggaggttcctttttgttgggtgagtctgcaagtgaatttcactgatgttgatattcattgtgtgtagttttatttcggtcccagccccgtttccttttattttggagctaatgccagctgcgtgtctagttttgagtgcagtaaaatagaatcagcaaatcactcttatttttcatccttttccggtattttttgggttgtttctgtgggagcagtgtacaccaactcttcctgtatattgcctttttgctggaaaatgttgtatgttgaataaaattttctataaaaattataattcagtgagttacgtggaagtggaggaagatttctactctccctggaaacaggcctgggaaaccttggcatttgtaacaaggtttcactgagatgtacttttccttctaattccgttttgcgggggcagggtctcttgtttctttttttttttttttttttttttagcctctaactagtcacatttactcttaagaaatgaaaggttttccaggagagaactgtgtacaaataaggtgactggagatgtgacctgatgtgtcacgaggcccttcggggcggcaggcgctatcgtgggcgtggtccttgcaccgtcccatcggccttgccttccagctccgtggcacggtttcctggtctttgggccagtgtgtaccttggagtgacttcctttctcaacttccactgcagtgtgtgtgccttctgctctgagagctgccttgtgacccgtgtgatagaaagcagggagtgagggtccccgcggacctggcccttccctccttcctcccccagaaagaggagttagagcaggggtgcgagagccgttcgctgtgggtttgtctttgaacaaacattaaggtgtcttgtttttgttctgggctgggggttggctgtagtcttaggtaactgaaagttcctactctcccttaaggtattaaatgactctttttccaaagaa

SEQ ID NO: 282 - DNA, 2151 bp, Homo sapiens
  gene (1)..(2151): Accession No. NM_003380
gcctctccaaaggctgcagaagtttcttgctaacaaaaagtccgcacattcgagcaaagacaggctttagcgagttattaaaaacttaggggcgctcttgtcccccacagggcccgaccgcacacagcaaggcgatggcccagctgtaagttggtagcactgagaactagcagcgcgcgcggagcccgctgagacttgaatcaatctggtctaacggtttcccctaaaccgctaggagccctcaatcggcgggacagcagggcgcgtcctctgccactctcgctccgaggtccccgcgccagagacgcagccgcgctcccaccacccacacccaccgcgccctcgttcgcctcttctccgggagccagtccgcgccaccgccgccgcccaggccatcgccaccctccgcagccatgtccaccaggtccgtgtcctcgtcctcctaccgcaggatgttcggcggcccgggcaccgcgagccggccgagctccagccggagctacgtgactacgtccacccgcacctacagcctgggcagcgcgctgcgccccagcaccagccgcagcctctacgcctcgtccccgggcggcgtgtatgccacgcgctcctctgccgtgcgcctgcggagcagcgtgcccggggtgcggctcctgcaggactcggtggacttctcgctggccgacgccatcaacaccgagttcaagaacacccgcaccaacgagaaggtggagctgcaggagctgaatgaccgcttcgccaactacatcgacaaggtgcgcttcctggagcagcagaataagatcctgctggccgagctcgagcagctcaagggccaaggcaagtcgcgcctgggggacctctacgaggaggagatgcgggagctgcgccggcaggtggaccagctaaccaacgacaaagcccgcgtcgaggtggagcgcgacaacctggccgaggacatcatgcgcctccgggagaaattgcaggaggagatgcttcagagagaggaagccgaaaacaccctgcaatctttcagacaggatgttgacaatgcgtctctggcacgtcttgaccttgaacgcaaagtggaatctttgcaagaagagattgcctttttgaagaaactccacgaagaggaaatccaggagctgcaggctcagattcaggaacagcatgtccaaatcgatgtggatgtttccaagcctgacctcacggctgccctgcgtgacgtacgtcagcaatatgaaagtgtggctgccaagaacctgcaggaggcagaagaatggtacaaatccaagtttgctgacctctctgaggctgccaaccggaacaatgacgccctgcgccaggcaaagcaggagtccactgagtaccggagacaggtgcagtccctcacctgtgaagtggatgcccttaaaggaaccaatgagtccctggaacgccagatgcgtgaaatggaagagaactttgccgttgaagctgctaactaccaagacactattggccgcctgcaggatgagattcagaatatgaaggaggaaatggctcgtcaccttcgtgaataccaagacctgctcaatgttaagatggcccttgacattgagattgccacctacaggaagctgctggaaggcgaggagagcaggatttctctgcctcttccaaacttttcctccctgaacctgagggaaactaatctggattcactccctctggttgatacccactcaaaaaggacacttctgattaagacggttgaaactagagatggacaggttatcaacgaaacttctcagcatcacgatgaccttgaataaaaattgcacacactcagtgcagcaatatattaccagcaagaataaaaaagaaatccatatcttaaagaaacagctttcaagtgcctttctgcagtttttcaggagcgcaagatagatttggaataggaataagctctagttcttaacaaccgacactcctacaagatttagaaaaaagtttacaacataatctagtttacagaaaaatcttgtgctagaatactttttaaaaggtattttgaataccattaaaactgcttttttttttccagcaagtatccaaccaacttggttctgcttcaataaatctttggaaaaactcaaaaaaaaaaaaaaa

SEQ ID NO: 283 - DNA, 5089 bp, Homo sapiens
  gene (1)..(5089): Accession No. NM_021083
ctcgggcaacggccgccgccgccacagccacacagccgccgccactgcgtccgtccccggtgagcgccgctgacgcgcggagatgaaattcccggcctcggtgctggcgtccgtgttcctgttcgtggccgagacaacggcggcgctcagcctgagcagcacctaccgctcgggcggggaccgcatgtggcaggcgctgacgttgcttttctcgctactgccttgcgcgctcgtgcagctcacgcttctcttcgtacaccgcgacctcagccgcgaccgcccgctcgtactgctgctgcacctgctgcaacttgggccccttttcaggtgttttgaagtcttctgcatctactttcagtcaggcaacaatgaagagccttatgtcagtatcaccaagaagaggcaaatgccaaaaaatggcctctcagaggagattgagaaggaggtgggccaggcagaaggcaaactaatcacccaccgatcagcgttcagccgggcgtcggtgatccaggctttcttgggctcagccccccagctgaccctacagctgtacataagtgtcatgcagcaggacgtcactgttggaagaagtctcctcatgaccatatccctgttgtccattgtgtatggagccttgcgctgcaacatcctagccatcaaaatcaagtacgatgagtatgaagtcaaagtgaagcctctggcctatgtctgtatcttcctgtggaggagctttgagattgccactcgagttgtagtcctggtcctctttacctccgtcctgaagacctgggtggtggttataatactcatcaacttcttcagtttcttcttgtacccctggatcctcttctggtgcagtggttccccattccctgagaacatagagaaggccctcagtagagtgggcaccaccattgtactatgctttctaactttactctatactggtatcaacatgttctgctggtctgctgtacagctgaaaattgacagccctgacctcatcagcaagtcccataattggtaccagctactggtgtattacatgataagattcatcgagaatgccatcctcctcctcctgtggtatcttttcaagactgacatctatatgtatgtgtgcgcacctctgttggtcctgcagctgctcattgggtactgcacagccattctcttcatgcttgtattctatcagttcttccacccttgcaaaaagctcttttcttccagtgtttctgaaggctttcagaggtggctcaggtgtttttgctgggcctgcaggcagcaaaaaccctgtgagccgataggaaaggaagatctacagtcatccagagatagagatgagacaccttctagcagtaaaacaagtcctgagcctggtcagttcttgaatgctgaagatctctgctctgcttaatgggacccaaggtctcagagcacaggcatattattttctgggtttgatactcgttattcatacaaataatgagccctacacagggaacaaggcaggaagttagctgttaactccttgtgagctgcttctctttatagagctcttgggtatgtagaactgtatgggaagaagccaggaaaacctctgagtgttgaaggggcaacccaaggcatcacagttcacaggtaaccatgttgtgttcttctaggcattactggccttttcactgacaagttacccctgaaatctgagttgtactggttagattcattaggttgaatgaggagaggggcttacctgttctctagttttccagactgctggtttgggtaacctgaagttttatgatccctgaacatagttttcacccaagagctgtcctggtgaccaaaaaagattactagggttttgccatcagcaacatcattcctgtcagagctttcagggagggctgttcaagtttggtttttgaatagacagaggtttcattttcatctcattagggcttttttgtacatagccaactgtagccaccctggcatgctgtctctaattgattcaagggcctagatttggagactttgttccttagcatccatggatgcagaaatgagtgataaatttggccatgaaagccctggaattttaggaaagttgtgattctttgatatgttgatgaaattctggatcaggaggggtgttaaaacatcaaaatgatggcgacttgtataagtagaattcttaccatcttactcctgcctccccattccttgcctgtcaggaccattttagaagagttaccttggttaacttaagggttttttagaaaaccccacagaaatctctcacccagttcaggtgtatagggaattttcattttcattatttcaaggaatagagttttcctcactaccacttgtaattagagattgacttcagaaactttttctaaattataaagacggaatgaccagaaaatttttgtctttcatggaatgcaatttgacttggcataattgtgagttaatttgataaagatctccagttgtatcctctgacaccctttaatgttctatataatttttcctttaatcggagaccctatttgtttcattaaagaggattgggtagcatatcctcaattatcttggaaaaatgcgtagatctagtgccattatttctaccattaaaatcttgaaagcgaaatacttgaaaagaggtgaccataaagatcacaccaatttagaatgaatattaaagtctgagaaatttacaaaagggactctatggactcgattttaccatatggaatagggatccacttctctgttaacctacaaaacgtatttatctggccattgcacttcggataattttcatttttaattcctcttggtgtcaaatttttaagtaatttcatgcacacaggagaaaatgcaatttgataatcagtttccactacattcggaggtcaagaaagcagtatatattctttcacaaggcatccatactgtttaatatttatagagttcatagaaatacatcaataagctcctaaattatagagcctcaattttggtttttctcatttgaaatgtttttgatttatcaatatttgtggtttaactttgtgggggtgtccaggcagtagatcattttttgtctatttttaaccaaataagaataacactcaagactatgttctccatcccaacacatcacttaccacttgcactattcttaataggcctaaaatagtgagcatatataatcaaaataatacttcatacaacatatacttccatgcactcttcatgtaatcacatatgtgcatagatacacaatcgtattacataaaacacccttgaaaatatatgactttgaataaaataaagctaccatgttaatacatcattttttgtttcttcctaattaacaaaagggctctataatgattaggagagctgtaaggccattctttagtcattccaagtgtatatttgtatcacaccagttacttgtgttcattgacaccaaatattttcaagctttttgtgagaaagagattcttgccttgaggctctgcagtggcaaatggtaggggcaatagcgctcccttttcacctgaaatgccttcagctcaggccttgggagtgaggtgtgggagtagccaccagcctcccactgactaggcatgttaggaattagacaaggatggagagactggttttttccagccttggtttggaagcttgtctcaaaaaccattacaaaatcttaaccttcaaatacattctaaatcactttaatttagaagataggtgagcaacttgagtgatcccaaaccaaactaacagtgctggtttgtccgacacccaaagcccacttcacacatttataaggacagagatttggtaactcatttgggtattttgtcagttttaacccttaatatacaggtatcccagctttgggcacatgtatgtccattcactttcaggaaggggtgtcagtactttctttctgtgtggtgaaaacataagccatggtgaactgataatttttgtttttaaattatttatattactgaattggcaaaattacagttcacactgcagagctaggttgtcctattggcataaaacaaaccagcaacttttctcatgtgtttggagttaaaatgtgtttttcagttataatttcaatttttaaatttcttggtgctttgtctaattaattacatcccataacttgtcaggatagttgctccaactgaattgctatcatttggctggatgggggtgaagtatgtcttcaaaatatattgaagtaagttcatcaaacatgtttagacttcctctcattgctggagacagcccagtgtagagattggcacttccctgtccagcactacaacttaattgctctatgcctcagtttccccataatacccttttccaacctacctcacaaggttatcagaaagatcaaattaaataatagatgtgaaaatgctttgaaaatgtttttaagtgctatgcatatttatagagttattatagttattcaaatccataagcaggttatttttatttttttactgtttgaaaagaaataagtagtgtcattcatatgagttcctgagtggatatgcgaatctttggtcttctcgacaggtgccctttctcttaccactagttgcttacaaaaatagcacccaaacacatggcacttggaagaaaaagacccactgaatctgagaaagtactttctggtggcaaatgaatttatcattttagtatagttttcgataaaggatatagcaacatcttttgataattgtgctttacaacttgaatgctgattcaaggcattatttggatgtgagtttaatcttttcagccttgtaaatgggaaaatatatattaaaattgattgtcaaatacagcatttctttggaaaccaccttaaaacattagtgctatggttatgagtgtatgtgccagtacttaccagtcaatgcattgtggatatgagctttcgttgactgcttctctgcagtcgttgatgctaataaatattgtcctgtttcttcatataataaattaatttttcaatttctccttgtaaaaa

SEQ ID NO: 284 - DNA, 2102 bp, Homo sapiens
  gene (1)..(2102): Accession No. NM_006297
ctcgcgcgcttgcgcactttagccagcgcagggcgcaccccgccccctcccactctccctgcccctcggaccccatactctacctcatccttctggccaggcgaagcccacgacgttgacatgccggagatccgcctccgccatgtcgtgtcctgcagcagccaggactcgactcactgtgcagaaaatcttctcaaggcagacacttaccgaaaatggcgggcagccaaggcaggcgagaagaccatctctgtggtcctacagttggagaaggaggagcagatacacagtgtggacattgggaatgatggctcagctttcgtggaggtgctggtgggcagttcagctggaggcgctggggagcaagactatgaggtccttctggtcacctcatctttcatgtccccttccgagagccgcagtggctcaaaccccaaccgcgttcgcatgtttgggcctgacaagctggtccgggcagccgccgagaagcgctgggaccgggtcaaaattgtttgcagccagccctacagcaaggactccccctttggcttgagttttgtacggtttcatagccccccagacaaagatgaggcagaggccccgtcccagaaggtgacagtgaccaagcttggccagttccgtgtgaaggaggaggatgagagcgccaactctctgaggccgggggctctcttcttcagccggatcaacaagacatccccagtcacagccagcgacccagcaggacctagctatgcagctgctaccctccaggcttctagtgctgcctcctcagcctctccagtctccagggccataggcagcacctccaagccccaggagtctcccaaagggaagaggaagttggatttgaaccaagaagaaaagaagacccccagcaaaccaccagcccagctgtcgccatctgttcccaagagacctaaattgccagctccaactcgtaccccagccacagccccagtccctgcccgagcacagggggcagtgacaggcaaaccccgaggagaaggcaccgagcccagacgaccccgagctggcccagaggagctggggaagatccttcagggtgtggtagtggtgctgagtggcttccagaaccccttccgctccgagctgcgagataaggccctagagcttggggccaagtatcggccagactggacccgggacagcacgcacctcatctgtgcctttgccaacacccccaagtacagccaggtcctaggcctgggaggccgcatcgtgcgtaaggagtgggtgctggactgtcaccgcatgcgtcggcggctgccctcccagaggtacctcatggcagggccaggttccagcagtgaggaggatgaggcctctcacagcggtggcagcggagatgaagcccccaagcttcctcagaagcaaccccagaccaaaaccaagcccactcaggcagctggacccagctcaccccagaagcccccaacccctgaagagaccaaagcagcctcaccagtgctccaggaagatatagacattgagggggtacagtcagaaggacaggacaatggggcggaagattctggggacacagaggatgagctgaggagggtggcagagcagaaggaacacagactgccccctggccaggaggagaatggggaagacccgtatgcaggctccacggatgagaacacggacagtgaggaacaccaggagcctcctgatctgccagtccctgagctcccagatttcttccagggcaagcacttctttctttacggggagttccctggggacgagcggcggaaactcatccgatacgtcacagccttcaatggggagctcgaggactatatgagtgaccgggttcagtttgtgatcacagcacaggaatgggatcccagctttgaggaggccctgatggacaacccctccctggcattcgttcgtccccgatggatctacagttgcaatgagaagcagaagttacttcctcaccagctctatggggtggtgccgcaagcctgaagtatgtgctatacacacacacacacacacacacacacacacacacacacgatgcatttaataaagatgagttggttctc

SEQ ID NO: 285 - DNA, 4312 bp, Homo sapiens
  gene (1)..(4312): Accession No. NM_007150
ctgaatcaagtgagaggagagctgcggagcaatcaccatgagtatctcagctcttggaggccgcaccaaagggaagcctctgccaccaggcgaggaggagcgcaataacgttctcaagcagatgaaagtgcgaaccacgctgaagggggacaagagctggattaccaagcaggatgaatcggagggtcgcaccatagagctgccctcaggccggagtcgcgccacatccttttcatcagctggggaggttccgaagcctaggcctccgagcacaagggctcccactggctacatcatccggggagtgttcaccaagcccatagacagctcttcccagccccagcagcagttccccaaggccaacgggactccaaaaagtgctgccagtctggtgagaacagctaacgctggtcctccccgcccctcctcctctggctacaagatgaccactgaggattacaagaagctggcaccctacaatatcaggcgcagctctacatcaggggacaccgaggaggaggaggaggaggaggtggtgccattctcctcagatgaacagaaacggaggtcagaggctgcaagcggtgttctgaggaggacagctccccgggagcactcctacgtcctgtcagcggccaagaagagcactggtcctacccaggagacacaggcaccgtttatcgcgaagagggtggaggtggtggaagaggacgggccttctgagaagagccaggacccacctgctctggcaagatccactcctggctcaaacagtgcggatggaggcaggaccaaagcgtctcgggcaatttggatcgagtgcctgccaagtatgcctagccccgctgggagccaggagctcagctcaagaggtgaggaaattgtccgcctgcagatcctgacacccagggcaggactccgcctggtggccccagacgtggaaggcatgaggtcttccccaggcaacaaagacaaggaggccccctgctccagagagctccagagggacttggctggtgaggaggctttcagggcccccaacacagatgctgcaaggtcaagtgcacagttgagtgatggcaatgtgggatccggagccacgggctcccggcctgaaggcttggctgcagtagacatcggctccgagagaggaagctccagtgccacttcagtctctgctgtccctgctgataggaagagcaacagcacagcagcccaggaggatgcaaaggcagacccaaagggggccttggctgattatgaggggaaggatgtggccaccagggtcggagaggcctggcaggagaggcctggagctccaagaggtggccaaggagacccagctgtacccgctcagcaacctgcagatcccagcaccccagagcggcagagcagccccagcggatctgagcaacttgtcagacgagagagttgtggcagcagcgtgttgactgattttgaggggaaggatgtggccaccaaggtcggagaggcctggcaggacaggcctggagccccaagaggtggccaaggagacccagctgtacccactcagcaacctgcagatcccagtaccccagaacagcagaacagccccagcggatctgagcaattcgtcagacgagagagctgcaccagcagggtgaggagcccctcgagctgcatggtcactgttactgtcactgccacatctgagcagcctcacatttatattccagcccccgcaagtgaattggactccagctctaccaccaaagggattctcttcgtgaaggagtacgtgaatgctagtgaagtgtcttctgggaagccagtatctgcacgctatagcaacgtcagcagcattgaggactcattcgccatggagaagaagcctccatgtggcagcactccatactctgagaggacaactggagggatctgtacttactgcaaccgtgagatccgagactgtccaaagattaccctagaacatcttggtatctgctgccatgaatattgctttaagtgtgggatttgcagtaaaccgatgggcgatctcctggatcagatcttcattcaccgtgacaccattcactgtgggaaatgctatgagaagctcttctagcgaccccccaccgccaggctgatcagaagctgatgactcgtggacaaatttggctgtccccagttttgccccaagttgctgtctccccttccctcacctcctccctccctgtttgatttcttcatgcttttgcccttctcaagttgaagttgcatacatccaatatcgtatcttaatgatgctatgataattgcttgtgtgtgtagcttcttgtagcttagaaagcgctttatgcccatgatgtcatttcaggctcaaccaaagaggatcaaacaggaattccatcttggcttccctaagacagattggctttctaatgagtttaagtgggcagaagtgtagggttcagtgtgtcctgactcccttgaggcttataatgggccaagttgaagactgttgatgatccctggtgggtaaattgcagacatcaaatgctagggattggcataggctagtgtttagcttgtctatttgccatatctattttttttaaatttccatacacttgtaaaagtagttagttgcttttgattgagttatatagcagtttttcatttggtcttccactcacctttcactatatttgagtgttcccttacaggtatgttggcatgtgttggaaaatttacacaattaggtttaaattcagtaggatgtgattttaggatgctactgatcaaagtgatatctgtgtctgttggaatcttgatagctgattaatttgccctcaattctgctccctgaacttcacacataaatcttcccaagtgggttttagggtgtatagatcccagcaggattaaggaggtggaaaagcagctaacatttcttgaggctctaccacatagcaggcactgtcacagagtaatggcattaatccccataataatcctgtgaaggtgatattctcatcccatcttagacatgaggatattggaactcagagaggtggctattgcattgcgcagaacgctacagagcccatgctcttcccagagcagcacccacaaaagcaagcattgattttgtgctcagtgtgtgccaagcactgtgcagagggtacacagttcctgccaggttaacaccctcccttcaggcctcccaaaggcataggcttgcaaagagcagaaggtgtgaaatcacactcttcctctgggcatcctggatccctgaattatccccccccccatgaagtacttcaagggccaagctgcccctttccctcctctccgcccatgaaaatgcctccaaactgagatgctttcagctgagaacagatttgactcacagacattaccaaagaggagcttgtgaatccaggaaaagctccagggggctagctgatctgagcagagagctttcagtgacccattttcctgtctagactctgccttaagctagtggcaactgctggggccccaggtacttgggacatggaaactcgttggatggctgggcagatgtaagcctgtccatgcagtcagccgatcctctgctcaggttcagctggactctgccatctgtgggcccagcatcactctgtaagttccttgaaaggaagaacaaccttagagtatttctgatacaaaatgagggcctctgctcttgatttaattataaaatgtctacgtctttctccagtttctgagccctatgcacattggcttgtgggcttgttcttcctgccaaatgatcagagaggaacattccatttatttgtagtggatttcctctggagggcatgtacccacactaaataccaactgctcttcctcagctgtagtccccaacatcagacttggcacgtggtggacactaacacacaggcactcaatgaatgagtgaaggaaataaaagtcaccccgttggtgagaggtgctatccctgagtctcagtgcaggaccagtggatgaaaggcaaggtaaagaggcccaagataggctggcttcccccgttcaaggtatagtctgcctttaagggagttttagaaccaacatgcaagacattgaaagaaatcttgcaagagccattattgacttagatccaaaacagcctctctcatgtctaaaaaggcacagaattttgcagatctgaggaagagggatgcattacctttttgcttcttttcaattgcttagtgtttctaatcatacttaatccacactaatgtgcgcaattataataaatggtaagatatcacatgtg

What is claimed is:

1. A method for evaluating the presence of colon cancer in a subject based on a sample from the subject, the sample providing a source of RNAs, comprising:
a) determining a quantitative measure of the amount of at least one constituent of any constituent of any one table selected from the group consisting of Tables 1, 2, 3, 4, and 5 as a distinct RNA constituent in the subject sample, wherein such measure is obtained under measurement conditions that are substantially repeatable and the constituent is selected so that measurement of the constituent distinguishes between a normal subject and a colon cancer-diagnosed subject in a reference population with at least 75% accuracy; and
b) comparing the quantitative measure of the constituent in the subject sample to a reference value.

2. A method for assessing or monitoring the response to therapy in a subject having colon cancer based on a sample from the subject, the sample providing a source of RNAs, comprising:
a) determining a quantitative measure of the amount of at least one constituent of any constituent of Tables 1, 2, 3, 4, and 5 as a distinct RNA constituent, wherein such measure is obtained under measurement conditions that are substantially repeatable to produce subject data set; and
b) comparing the subject data set to a baseline data set.

3. A method for monitoring the progression of colon cancer in a subject, based on a sample from the subject, the sample providing a source of RNAs, comprising:
a) determining a quantitative measure of the amount of at least one constituent of any constituent of Tables 1, 2, 3, 4, and 5 as a distinct RNA constituent in a sample obtained at a first period of time, wherein such measure is obtained under measurement conditions that are substantially repeatable to produce a first subject data set;
b) determining a quantitative measure of the amount of at least one constituent of any constituent of Tables 1, 2, 3, 4, and 5 as a distinct RNA constituent in a sample obtained at a second period of time, wherein such measure is obtained under measurement conditions that are substantially repeatable to produce a second subject data set; and
c) comparing the first subject data set and the second subject data set.

4. A method for determining a colon cancer profile based on a sample from a subject known to have colon cancer, the sample providing a source of RNAs, the method comprising:
a) using amplification for measuring the amount of RNA in a panel of constituents including at least 1 constituent from Tables 1, 2, 3, 4, and 5 and
b) arriving at a measure of each constituent,
wherein the profile data set comprises the measure of each constituent of the panel and wherein amplification is performed under measurement conditions that are substantially repeatable.

5. The method of any one of claims 1-4, wherein said constituent is selected from the group consisting of AXIN2, C1QA, CDKN2A, CCR7, CNKSR2, C1QB, EGR1, MSH2, MSH6 and RHOC.

6. The method of any one of claims 1-4, comprising measuring at least two constituents from
a) Table 1, wherein the first constituent is selected from the group consisting of ACSL5, ALDH1A1, APC, AXIN2, BAX, CA4, CCND3, CD44, CD63, CFLAR, GADD45A, IGFBP4, ITGA3, MGMT, MSH2, and MSH6 and the second constituent is any other constituent selected from Table 1, wherein the constituent is selected so that measurement of the constituent distinguishes between a normal subject and a colon cancer-diagnosed subject in a reference population with at least 75% accuracy;
b) Table 2, wherein the first constituent is selected from the group consisting of ADAM17, ALOX5, APAF1, C1QA, CASP1, CASP3, CCL3, CCL5, CCR5, CD19, CD4, CD8A, CTLA4, CXCL1, CXCR3, DPP4, EGR1, GZMB, HLADRA, HMOX1, HSPA1A, ICAM1, IFI16, IFNG, IL10, IL18, IL18BP, IL1B, IL1R1, IL1RN, IL23A, IL32, IL8, IRF1, LTA, MAPK14, MHC2TA, MIF, MMP9, MNDA, MYC, NFKB1, PLA2G7, PLAUR, PTGS2, PTPRC, SERPINA1, SSI3, TGFB1, TIMP1, TLR2, TNF, and TNFRSF1A, and the second constituent is any other constituent selected from Table 2, wherein the constituent is selected so that measurement of the constituent distinguishes between a normal subject and a colon cancer-diagnosed subject in a reference population with at least 75% accuracy;
c) Table 3 wherein the first constituent is selected from the group consisting of ABL1, ABL2, AKT1, APAF1, ATM, BAD, BAX, BCL2, BRAF, BRCA1, CASP8, CDK2, CDK4, CDK5, CDKN1A, CDKN2A, CFLAR, COL18A1, E2F1, EGR1, ERBB2, FOS, GZMA, HRAS, IFITM1, IL1B, IL8, ITGA1, ITGA3, ITGAE, ITGB1, MMP9, MSH2, MYC, MYCL1, NFKB1, NME4, NOTCH2, NRAS, PCNA, PLAUR, PTCH1, RB1, RHOA, RHOC, S100A4, SEMA4D, SERPINE1, SKI, SKIL, SMAD4, TGFB1, and TNF and the second constituent is any other constituent selected from Table 3, wherein the constituent is selected so that measurement of the constituent distinguishes between a normal subject and a colon cancer-diagnosed subject in a reference population with at least 75% accuracy;
d) Table 4 wherein the first constituent is selected from the group consisting of CEBPB, CREBBP, EGR1, EGR2, FOS, ICAM1, MAP2K1, NAB1, NFKB1, NR4A2, SRC, TGFB1, and TOPBP1 and the second constituent is from the group consisting of NAB1, NR4A2, PDGFA, PTEN, TGFB1, TNFRSF6, and TOPBP1, wherein the constituent is selected so that measurement of the constituent distinguishes between a normal subject and a colon cancer-diagnosed subject in a reference population with at least 75% accuracy; and
e) Table 5 wherein the first constituent is selected from the group consisting of ADAM17, APC, AXIN2, BAX, BCAM, C1QA, C1QB, CA4, CASP9, CAV1, CCL3, CCL5, CCR7, CD59, CD97, CNKSR2, CTNNA1, CTSD, DAD1, DIABLO, E2F1, EGR1, ESR1, ETS2, FOS, G6PD, GNB1, GSK3B, HMGA1, HMOX1, HOXA10, IFI16, IGF2BP2, IKBKE, IL8, ING2, IQGAP1, IRF1, ITGAL, LARGE, LGALS8, LTA, MAPK14, MLH1, MME, MMP9, MNDA, MSH2, MSH6, MTA1, MTF1, MYD88, NBEA, NCOA1, NRAS, PLEK2, PLXDC2, PTEN, PTPRK, RBM5, S100A4, SERPINE1, SERPING1, SIAH2, SPARC, SRF, ST14, TGFB1, TIMP1, TLR2, TNF, TNFRSF1A, TNFSF5, and UBE2C and the second constituent is any other constituents selected from Table 5, wherein the constituent is selected so that measurement of the constituent distinguishes between a normal subject and a colon cancer-diagnosed subject in a reference population with at least 75% accuracy.

7. The method of any one of claims 1-6, wherein the combination of constituents are selected according to any of the models enumerated in Tables 1A, 2A, 3A, 4A, or 5A.

8. The method of any one of claims 1, 5 and 6, wherein said reference value is an index value.

9. The method of claim 2, wherein said therapy is immunotherapy.

10. The method of claim 9, wherein said constituent is selected from Table 6.

11. The method of any one of claim 2, 9 or 10, wherein when the baseline data set is derived from a normal subject a similarity in the subject data set and the baseline date set indicates that said therapy is efficacious.

12. The method of any one of claim 2, 9 or 10, wherein when the baseline data set is derived from a subject known to have colon cancer a similarity in the subject data set and the baseline date set indicates that said therapy is not efficacious.

13. The method of any one of claims 1-12, wherein expression of said constituent in said subject is increased compared to expression of said constituent in a normal reference sample.

14. The method of any one of claims 1-12, wherein expression of said constituent in said subject is decreased compared to expression of said constituent in a normal reference sample.

15. The method of any one of claims 1-12, wherein the sample is selected from the group consisting of blood, a blood fraction, a body fluid, a cells and a tissue.

16. The method of any one of claims 1-15, wherein the measurement conditions that are substantially repeatable are within a degree of repeatability of better than ten percent.

17. The method of any one of claims 1-16, wherein the measurement conditions that are substantially repeatable are within a degree of repeatability of better than five percent.

18. The method of any one of claims 1-17, wherein the measurement conditions that are substantially repeatable are within a degree of repeatability of better than three percent.

19. The method of any one of claims 1-18, wherein efficiencies of amplification for all constituents are substantially similar.

20. The method of any one of claims 1-19, wherein the efficiency of amplification for all constituents is within ten percent.

21. The method of any one of claims 1-20, wherein the efficiency of amplification for all constituents is within five percent.

22. The method of any one of claims 1-19, wherein the efficiency of amplification for all constituents is within three percent.

23. A kit for detecting colon cancer in a subject, comprising at least one reagent for the detection or quantification of any constituent measured according to any one of claims 1-22 and instructions for using the kit.
